United States Patent Application Publication US 2021/0260219 A1 - sequence listing, part 3

SEQ ID NO: 65627 - DNA, 20 bp, Artificial Sequence
  chemically synthesized
ggtctttgaagcattagtag

SEQ ID NO: 65628 - DNA, 20 bp, Artificial Sequence
  chemically synthesized
ttgaagcattagtaggagtt

SEQ ID NO: 65629 - DNA, 20 bp, Artificial Sequence
  chemically synthesized
tagtaggagttcagcgatga

SEQ ID NO: 65630 - DNA, 20 bp, Artificial Sequence
  chemically synthesized
ttcagcgatgatggtgtcat

SEQ ID NO: 65631 - DNA, 20 bp, Artificial Sequence
  chemically synthesized
gtgtcatgagaattttattc

SEQ ID NO: 65632 - DNA, 20 bp, Artificial Sequence
  chemically synthesized
tgtcatgagaattttattct

SEQ ID NO: 65633 - DNA, 20 bp, Artificial Sequence
  chemically synthesized
tgagaattttattctaggat

SEQ ID NO: 65634 - DNA, 20 bp, Artificial Sequence
  chemically synthesized
gagaattttattctaggatt

SEQ ID NO: 65635 - DNA, 20 bp, Artificial Sequence
  chemically synthesized
gaattttattctaggattag

SEQ ID NO: 65636 - DNA, 20 bp, Artificial Sequence
  chemically synthesized
aattttattctaggattagg

SEQ ID NO: 65637 - DNA, 20 bp, Artificial Sequence
  chemically synthesized
attaggaggtaccatgaaca

SEQ ID NO: 65638 - DNA, 20 bp, Artificial Sequence
  chemically synthesized
aggtaccatgaacaaagata

SEQ ID NO: 65639 - DNA, 20 bp, Artificial Sequence
  chemically synthesized
gtaccatgaacaaagataca

SEQ ID NO: 65640 - DNA, 20 bp, Artificial Sequence
  chemically synthesized
catgaacaaagatacagagc

SEQ ID NO: 65641 - DNA, 20 bp, Artificial Sequence
  chemically synthesized
atgaacaaagatacagagct

SEQ ID NO: 65642 - DNA, 20 bp, Artificial Sequence
  chemically synthesized
agatacagagctgggaaaac

SEQ ID NO: 65643 - DNA, 20 bp, Artificial Sequence
  chemically synthesized
atacagagctgggaaaacca

SEQ ID NO: 65644 - DNA, 20 bp, Artificial Sequence
  chemically synthesized
tacagagctgggaaaaccag

SEQ ID NO: 65645 - DNA, 20 bp, Artificial Sequence
  chemically synthesized
agagctgggaaaaccagagg

SEQ ID NO: 65646 - DNA, 20 bp, Artificial Sequence
  chemically synthesized
gctgggaaaaccagaggtgg

SEQ ID NO: 65647 - DNA, 20 bp, Artificial Sequence
  chemically synthesized
gaaaaccagaggtggaagat

SEQ ID NO: 65648 - DNA, 20 bp, Artificial Sequence
  chemically synthesized
aaaaccagaggtggaagata

SEQ ID NO: 65649 - DNA, 20 bp, Artificial Sequence
  chemically synthesized
aaccagaggtggaagataag

SEQ ID NO: 65650 - DNA, 20 bp, Artificial Sequence
  chemically synthesized
agataaggagcacatgtcca

SEQ ID NO: 65651 - DNA, 20 bp, Artificial Sequence
  chemically synthesized
gttctttttctttttttttt

SEQ ID NO: 65652 - DNA, 20 bp, Artificial Sequence
  chemically synthesized
tttttcttttttttttgaga

SEQ ID NO: 65653 - DNA, 20 bp, Artificial Sequence
  chemically synthesized
tttcttttttttttgagatg

SEQ ID NO: 65654 - DNA, 20 bp, Artificial Sequence
  chemically synthesized
ggagtttcgctcttgttgcc

SEQ ID NO: 65655 - DNA, 20 bp, Artificial Sequence
  chemically synthesized
gagtttcgctcttgttgccc

SEQ ID NO: 65656 - DNA, 20 bp, Artificial Sequence
  chemically synthesized
ttcgctcttgttgcccaggc

SEQ ID NO: 65657 - DNA, 20 bp, Artificial Sequence
  chemically synthesized
cgctcttgttgcccaggctg

SEQ ID NO: 65658 - DNA, 20 bp, Artificial Sequence
  chemically synthesized
ttgcccaggctggagtgcaa

SEQ ID NO: 65659 - DNA, 20 bp, Artificial Sequence
  chemically synthesized
caggctggagtgcaatggtg

SEQ ID NO: 65660 - DNA, 20 bp, Artificial Sequence
  chemically synthesized
ggagtgcaatggtgcagtct

SEQ ID NO: 65661 - DNA, 20 bp, Artificial Sequence
  chemically synthesized
tcactgcaacatctgtctcc

SEQ ID NO: 65662 - DNA, 20 bp, Artificial Sequence
  chemically synthesized
cactgcaacatctgtctccc

SEQ ID NO: 65663 - DNA, 20 bp, Artificial Sequence
  chemically synthesized
aacatctgtctcccgggttc

SEQ ID NO: 65664 - DNA, 20 bp, Artificial Sequence
  chemically synthesized
atctgtctcccgggttcaag

SEQ ID NO: 65665 - DNA, 20 bp, Artificial Sequence
  chemically synthesized
ttcaagtggttctcctgcct

SEQ ID NO: 65666 - DNA, 20 bp, Artificial Sequence
  chemically synthesized
ttctcctgcctcagcctccc

SEQ ID NO: 65667 - DNA, 20 bp, Artificial Sequence
  chemically synthesized
tcctgcctcagcctcccaag

SEQ ID NO: 65668 - DNA, 20 bp, Artificial Sequence
  chemically synthesized
gcctcagcctcccaagaagc

SEQ ID NO: 65669 - DNA, 20 bp, Artificial Sequence
  chemically synthesized
cctcagcctcccaagaagct

SEQ ID NO: 65670 - DNA, 20 bp, Artificial Sequence
  chemically synthesized
ctcccaagaagctgggatta

SEQ ID NO: 65671 - DNA, 20 bp, Artificial Sequence
  chemically synthesized
tcccaagaagctgggattac

SEQ ID NO: 65672 - DNA, 20 bp, Artificial Sequence
  chemically synthesized
caggtacctgccaccacgcc

SEQ ID NO: 65673 - DNA, 20 bp, Artificial Sequence
  chemically synthesized
ccggctaatttttgtatttt

SEQ ID NO: 65674 - DNA, 20 bp, Artificial Sequence
  chemically synthesized
gctaatttttgtatttttag

SEQ ID NO: 65675 - DNA, 20 bp, Artificial Sequence
  chemically synthesized
taatttttgtatttttagta

SEQ ID NO: 65676 - DNA, 20 bp, Artificial Sequence
  chemically synthesized
tttttgtatttttagtagag

SEQ ID NO: 65677 - DNA, 20 bp, Artificial Sequence
  chemically synthesized
ttttgtatttttagtagaga

SEQ ID NO: 65678 - DNA, 20 bp, Artificial Sequence
  chemically synthesized
tttgtatttttagtagagaa

SEQ ID NO: 65679 - DNA, 20 bp, Artificial Sequence
  chemically synthesized
ttgtatttttagtagagaag

SEQ ID NO: 65680 - DNA, 20 bp, Artificial Sequence
  chemically synthesized
gagaaggggtttcaccacgt

SEQ ID NO: 65681 - DNA, 20 bp, Artificial Sequence
  chemically synthesized
aggggtttcaccacgttggc

SEQ ID NO: 65682 - DNA, 20 bp, Artificial Sequence
  chemically synthesized
ggggtttcaccacgttggcc

SEQ ID NO: 65683 - DNA, 20 bp, Artificial Sequence
  chemically synthesized
tttcaccacgttggccaggc

SEQ ID NO: 65684 - DNA, 20 bp, Artificial Sequence
  chemically synthesized
tcgcaaactcctgacctcct

SEQ ID NO: 65685 - DNA, 20 bp, Artificial Sequence
  chemically synthesized
caaactcctgacctcctcag

SEQ ID NO: 65686 - DNA, 20 bp, Artificial Sequence
  chemically synthesized
ctgacctcctcagtggatcc

SEQ ID NO: 65687 - DNA, 20 bp, Artificial Sequence
  chemically synthesized
tgacctcctcagtggatccg

SEQ ID NO: 65688 - DNA, 20 bp, Artificial Sequence
  chemically synthesized
acctcctcagtggatccgag

SEQ ID NO: 65689 - DNA, 20 bp, Artificial Sequence
  chemically synthesized
cctcctcagtggatccgagg

SEQ ID NO: 65690 - DNA, 20 bp, Artificial Sequence
  chemically synthesized
aggaggtgatcctcccgcct

SEQ ID NO: 65691 - DNA, 20 bp, Artificial Sequence
  chemically synthesized
cctcccgcctcagcctccca

SEQ ID NO: 65692 - DNA, 20 bp, Artificial Sequence
  chemically synthesized
ctcccaaagtgctcgaatta

SEQ ID NO: 65693 - DNA, 20 bp, Artificial Sequence
  chemically synthesized
tcccaaagtgctcgaattac

SEQ ID NO: 65694 - DNA, 20 bp, Artificial Sequence
  chemically synthesized
agtgctcgaattacaggtgt

SEQ ID NO: 65695 - DNA, 20 bp, Artificial Sequence
  chemically synthesized
caggtgtgagccaccacgcc

SEQ ID NO: 65696 - DNA, 20 bp, Artificial Sequence
  chemically synthesized
gccaccacgcctggcctcca

SEQ ID NO: 65697 - DNA, 20 bp, Artificial Sequence
  chemically synthesized
taaaatgttacgaaaaccaa

SEQ ID NO: 65698 - DNA, 20 bp, Artificial Sequence
  chemically synthesized
tttttttgtgatttatttga

SEQ ID NO: 65699 - DNA, 20 bp, Artificial Sequence
  chemically synthesized
ttttgtgatttatttgatgg

SEQ ID NO: 65700 - DNA, 20 bp, Artificial Sequence
  chemically synthesized
cacctgacgtgaactgacat

SEQ ID NO: 65701 - DNA, 20 bp, Artificial Sequence
  chemically synthesized
acatgagattatttttaatt

SEQ ID NO: 65702 - DNA, 20 bp, Artificial Sequence
  chemically synthesized
tattcatatattttgctgca

SEQ ID NO: 65703 - DNA, 20 bp, Artificial Sequence
  chemically synthesized
atattttgctgcatagatta

SEQ ID NO: 65704 - DNA, 20 bp, Artificial Sequence
  chemically synthesized
gctgcatagattacagtatg

SEQ ID NO: 65705 - DNA, 20 bp, Artificial Sequence
  chemically synthesized
tagattacagtatgcagctc

SEQ ID NO: 65706 - DNA, 20 bp, Artificial Sequence
  chemically synthesized
atgcagctccagattcttcc

SEQ ID NO: 65707 - DNA, 20 bp, Artificial Sequence
  chemically synthesized
cagctccagattcttccaag

SEQ ID NO: 65708 - DNA, 20 bp, Artificial Sequence
  chemically synthesized
tgcctttctaaaatccaaac

SEQ ID NO: 65709 - DNA, 20 bp, Artificial Sequence
  chemically synthesized
ctaaaatccaaacaagttct

SEQ ID NO: 65710 - DNA, 20 bp, Artificial Sequence
  chemically synthesized
taaaatccaaacaagttctg

SEQ ID NO: 65711 - DNA, 20 bp, Artificial Sequence
  chemically synthesized
tctgaggttcaaaaccgttt

SEQ ID NO: 65712 - DNA, 20 bp, Artificial Sequence
  chemically synthesized
ttcaaaaccgttttggccct

SEQ ID NO: 65713 - DNA, 20 bp, Artificial Sequence
  chemically synthesized
tcaaaaccgttttggcccta

SEQ ID NO: 65714 - DNA, 20 bp, Artificial Sequence
  chemically synthesized
ccgttttggccctaaggctt

SEQ ID NO: 65715 - DNA, 20 bp, Artificial Sequence
  chemically synthesized
cgttttggccctaaggcttt

SEQ ID NO: 65716 - DNA, 20 bp, Artificial Sequence
  chemically synthesized
tggccctaaggctttgggta

SEQ ID NO: 65717 - DNA, 20 bp, Artificial Sequence
  chemically synthesized
ggccctaaggctttgggtaa

SEQ ID NO: 65718 - DNA, 20 bp, Artificial Sequence
  chemically synthesized
gccctaaggctttgggtaaa

SEQ ID NO: 65719 - DNA, 20 bp, Artificial Sequence
  chemically synthesized
ccctaaggctttgggtaaag

SEQ ID NO: 65720 - DNA, 20 bp, Artificial Sequence
  chemically synthesized
cctaaggctttgggtaaagg

SEQ ID NO: 65721 - DNA, 20 bp, Artificial Sequence
  chemically synthesized
aaggctttgggtaaaggggg

SEQ ID NO: 65722 - DNA, 20 bp, Artificial Sequence
  chemically synthesized
ggactctgttctactctgac

SEQ ID NO: 65723 - DNA, 20 bp, Artificial Sequence
  chemically synthesized
actctgttctactctgactg

SEQ ID NO: 65724 - DNA, 20 bp, Artificial Sequence
  chemically synthesized
ttctactctgactggagtcc

SEQ ID NO: 65725 - DNA, 20 bp, Artificial Sequence
  chemically synthesized
gagtccaagatgcatatata

SEQ ID NO: 65726 - DNA, 20 bp, Artificial Sequence
  chemically synthesized
gtccaagatgcatatataca

SEQ ID NO: 65727 - DNA, 20 bp, Artificial Sequence
  chemically synthesized
gatgcatatatacagagata

SEQ ID NO: 65728 - DNA, 20 bp, Artificial Sequence
  chemically synthesized
atgcatatatacagagatat

SEQ ID NO: 65729 - DNA, 20 bp, Artificial Sequence
  chemically synthesized
atatacagagatatgggtga

SEQ ID NO: 65730 - DNA, 20 bp, Artificial Sequence
  chemically synthesized
tatacagagatatgggtgat

SEQ ID NO: 65731 - DNA, 20 bp, Artificial Sequence
  chemically synthesized
atacagagatatgggtgatg

SEQ ID NO: 65732 - DNA, 20 bp, Artificial Sequence
  chemically synthesized
gatatgggtgatggggctgc

SEQ ID NO: 65733 - DNA, 20 bp, Artificial Sequence
  chemically synthesized
atatgggtgatggggctgca

SEQ ID NO: 65734 - DNA, 20 bp, Artificial Sequence
  chemically synthesized
tgggtgatggggctgcaagg

SEQ ID NO: 65735 - DNA, 20 bp, Artificial Sequence
  chemically synthesized
gggtgatggggctgcaaggt

SEQ ID NO: 65736 - DNA, 20 bp, Artificial Sequence
  chemically synthesized
atggggctgcaaggtaggtt

SEQ ID NO: 65737 - DNA, 20 bp, Artificial Sequence
  chemically synthesized
tggggctgcaaggtaggttg

SEQ ID NO: 65738 - DNA, 20 bp, Artificial Sequence
  chemically synthesized
ggctgcaaggtaggttgagg

SEQ ID NO: 65739 - DNA, 20 bp, Artificial Sequence
  chemically synthesized
gctgcaaggtaggttgaggt

SEQ ID NO: 65740 - DNA, 20 bp, Artificial Sequence
  chemically synthesized
ctgcaaggtaggttgaggta

SEQ ID NO: 65741 - DNA, 20 bp, Artificial Sequence
  chemically synthesized
tgcaaggtaggttgaggtag

SEQ ID NO: 65742 - DNA, 20 bp, Artificial Sequence
  chemically synthesized
ggtaggttgaggtaggggcc

SEQ ID NO: 65743 - DNA, 20 bp, Artificial Sequence
  chemically synthesized
gtaggttgaggtaggggcca

SEQ ID NO: 65744 - DNA, 20 bp, Artificial Sequence
  chemically synthesized
aggttgaggtaggggccaag

SEQ ID NO: 65745 - DNA, 20 bp, Artificial Sequence
  chemically synthesized
ggttgaggtaggggccaagg

SEQ ID NO: 65746 - DNA, 20 bp, Artificial Sequence
  chemically synthesized
ttgaggtaggggccaaggag

SEQ ID NO: 65747 - DNA, 20 bp, Artificial Sequence
  chemically synthesized
gtaggggccaaggaggagca

SEQ ID NO: 65748 - DNA, 20 bp, Artificial Sequence
  chemically synthesized
aggggccaaggaggagcatg

SEQ ID NO: 65749 - DNA, 20 bp, Artificial Sequence
  chemically synthesized
ccaaggaggagcatggagtt

SEQ ID NO: 65750 - DNA, 20 bp, Artificial Sequence
  chemically synthesized
ggagtttggacttgattcat

SEQ ID NO: 65751 - DNA, 20 bp, Artificial Sequence
  chemically synthesized
gagtttggacttgattcatg

SEQ ID NO: 65752 - DNA, 20 bp, Artificial Sequence
  chemically synthesized
ggacttgattcatgaggctg

SEQ ID NO: 65753 - DNA, 20 bp, Artificial Sequence
  chemically synthesized
gacttgattcatgaggctgt

SEQ ID NO: 65754 - DNA, 20 bp, Artificial Sequence
  chemically synthesized
acttgattcatgaggctgtg

SEQ ID NO: 65755 - DNA, 20 bp, Artificial Sequence
  chemically synthesized
ttgattcatgaggctgtggg

SEQ ID NO: 65756 - DNA, 20 bp, Artificial Sequence
  chemically synthesized
ttcatgaggctgtggggagc

SEQ ID NO: 65757 - DNA, 20 bp, Artificial Sequence
  chemically synthesized
gaggctgtggggagccagtg

SEQ ID NO: 65758 - DNA, 20 bp, Artificial Sequence
  chemically synthesized
aggctgtggggagccagtga

SEQ ID NO: 65759 - DNA, 20 bp, Artificial Sequence
  chemically synthesized
gggagccagtgaaggttctt

SEQ ID NO: 65760 - DNA, 20 bp, Artificial Sequence
  chemically synthesized
agccagtgaaggttcttaag

SEQ ID NO: 65761 - DNA, 20 bp, Artificial Sequence
  chemically synthesized
gccagtgaaggttcttaagc

SEQ ID NO: 65762 - DNA, 20 bp, Artificial Sequence
  chemically synthesized
ttaagcaggtatgtctgcct

SEQ ID NO: 65763 - DNA, 20 bp, Artificial Sequence
  chemically synthesized
aagcaggtatgtctgcctga

SEQ ID NO: 65764 - DNA, 20 bp, Artificial Sequence
  chemically synthesized
caggtatgtctgcctgagag

SEQ ID NO: 65765 - DNA, 20 bp, Artificial Sequence
  chemically synthesized
tatgtctgcctgagagcagt

SEQ ID NO: 65766 - DNA, 20 bp, Artificial Sequence
  chemically synthesized
tgtctgcctgagagcagttg

SEQ ID NO: 65767 - DNA, 20 bp, Artificial Sequence
  chemically synthesized
ctgcctgagagcagttggag

SEQ ID NO: 65768 - DNA, 20 bp, Artificial Sequence
  chemically synthesized
tgagagcagttggagcagac

SEQ ID NO: 65769 - DNA, 20 bp, Artificial Sequence
  chemically synthesized
agagcagttggagcagacaa

SEQ ID NO: 65770 - DNA, 20 bp, Artificial Sequence
  chemically synthesized
aaaaaccaaacaaatcacca

SEQ ID NO: 65771 - DNA, 20 bp, Artificial Sequence
  chemically synthesized
accaaacaaatcaccataga

SEQ ID NO: 65772 - DNA, 20 bp, Artificial Sequence
  chemically synthesized
aaacaaatcaccatagatag

SEQ ID NO: 65773 - DNA, 20 bp, Artificial Sequence
  chemically synthesized
tgtcccctccaaatctcatg

SEQ ID NO: 65774 - DNA, 20 bp, Artificial Sequence
  chemically synthesized
ccaaatctcatgtggaaatt

SEQ ID NO: 65775 - DNA, 20 bp, Artificial Sequence
  chemically synthesized
tcatgtggaaatttggtcct

SEQ ID NO: 65776 - DNA, 20 bp, Artificial Sequence
  chemically synthesized
ggaaatttggtcctcagtgt

SEQ ID NO: 65777 - DNA, 20 bp, Artificial Sequence
  chemically synthesized
aatttggtcctcagtgttgg

SEQ ID NO: 65778 - DNA, 20 bp, Artificial Sequence
  chemically synthesized
ttggtcctcagtgttggaag

SEQ ID NO: 65779 - DNA, 20 bp, Artificial Sequence
  chemically synthesized
tggtcctcagtgttggaagt

SEQ ID NO: 65780 - DNA, 20 bp, Artificial Sequence
  chemically synthesized
ggtcctcagtgttggaagtg

SEQ ID NO: 65781 - DNA, 20 bp, Artificial Sequence
  chemically synthesized
gtgttggaagtggggcctaa

SEQ ID NO: 65782 - DNA, 20 bp, Artificial Sequence
  chemically synthesized
tgttggaagtggggcctaat

SEQ ID NO: 65783 - DNA, 20 bp, Artificial Sequence
  chemically synthesized
ttggaagtggggcctaatgg

SEQ ID NO: 65784 - DNA, 20 bp, Artificial Sequence
  chemically synthesized
tggaagtggggcctaatggg

SEQ ID NO: 65785 - DNA, 20 bp, Artificial Sequence
  chemically synthesized
ggggcctaatgggaggtgtt

SEQ ID NO: 65786 - DNA, 20 bp, Artificial Sequence
  chemically synthesized
gggcctaatgggaggtgttt

SEQ ID NO: 65787 - DNA, 20 bp, Artificial Sequence
  chemically synthesized
aatgggaggtgtttgggtca

SEQ ID NO: 65788 - DNA, 20 bp, Artificial Sequence
  chemically synthesized
atgggaggtgtttgggtcat

SEQ ID NO: 65789 - DNA, 20 bp, Artificial Sequence
  chemically synthesized
tgggaggtgtttgggtcatg

SEQ ID NO: 65790 - DNA, 20 bp, Artificial Sequence
  chemically synthesized
gggaggtgtttgggtcatgg

SEQ ID NO: 65791 - DNA, 20 bp, Artificial Sequence
  chemically synthesized
gaggtgtttgggtcatgggg

SEQ ID NO: 65792 - DNA, 20 bp, Artificial Sequence
  chemically synthesized
aggtgtttgggtcatggggg

SEQ ID NO: 65793 - DNA, 20 bp, Artificial Sequence
  chemically synthesized
tgggggaggaacccctgtga

SEQ ID NO: 65794 - DNA, 20 bp, Artificial Sequence
  chemically synthesized
gggggaggaacccctgtgaa

SEQ ID NO: 65795 - DNA, 20 bp, Artificial Sequence
  chemically synthesized
aggaacccctgtgaaaggct

SEQ ID NO: 65796 - DNA, 20 bp, Artificial Sequence
  chemically synthesized
ggtgccgtccttgtgataat

SEQ ID NO: 65797 - DNA, 20 bp, Artificial Sequence
  chemically synthesized
ccgtccttgtgataatgagt

SEQ ID NO: 65798 - DNA, 20 bp, Artificial Sequence
  chemically synthesized
tcccgctatgatttcccttg

SEQ ID NO: 65799 - DNA, 20 bp, Artificial Sequence
  chemically synthesized
cccgctatgatttcccttga

SEQ ID NO: 65800 - DNA, 20 bp, Artificial Sequence
  chemically synthesized
cttgaaggctgattattaaa

SEQ ID NO: 65801 - DNA, 20 bp, Artificial Sequence
  chemically synthesized
tgaaggctgattattaaaaa

SEQ ID NO: 65802 - DNA, 20 bp, Artificial Sequence
  chemically synthesized
gctgattattaaaaagagct

SEQ ID NO: 65803 - DNA, 20 bp, Artificial Sequence
  chemically synthesized
gtgattgatctctgcacatg

SEQ ID NO: 65804 - DNA, 20 bp, Artificial Sequence
  chemically synthesized
tgattgatctctgcacatgt

SEQ ID NO: 65805 - DNA, 20 bp, Artificial Sequence
  chemically synthesized
tccccttcaccttctgccat

SEQ ID NO: 65806 - DNA, 20 bp, Artificial Sequence
  chemically synthesized
tcaccttctgccatcagtga

SEQ ID NO: 65807 - DNA, 20 bp, Artificial Sequence
  chemically synthesized
ccttctgccatcagtgaaag

SEQ ID NO: 65808 - DNA, 20 bp, Artificial Sequence
  chemically synthesized
gccatcagtgaaagcagctt

SEQ ID NO: 65809 - DNA, 20 bp, Artificial Sequence
  chemically synthesized
ccatcagtgaaagcagctta

SEQ ID NO: 65810 - DNA, 20 bp, Artificial Sequence
  chemically synthesized
aagcagcttaaggccctcac

SEQ ID NO: 65811 - DNA, 20 bp, Artificial Sequence
  chemically synthesized
cagcttaaggccctcaccag

SEQ ID NO: 65812 - DNA, 20 bp, Artificial Sequence
  chemically synthesized
cttaaggccctcaccagaag

SEQ ID NO: 65813 - DNA, 20 bp, Artificial Sequence
  chemically synthesized
ccctcaccagaagcagatgc

SEQ ID NO: 65814 - DNA, 20 bp, Artificial Sequence
  chemically synthesized
gatgctggtgccatgcttcc

SEQ ID NO: 65815 - DNA, 20 bp, Artificial Sequence
  chemically synthesized
tgctggtgccatgcttcctg

SEQ ID NO: 65816 - DNA, 20 bp, Artificial Sequence
  chemically synthesized
ctggtgccatgcttcctgga

SEQ ID NO: 65817 - DNA, 20 bp, Artificial Sequence
  chemically synthesized
catgcttcctggagagcttg

SEQ ID NO: 65818 - DNA, 20 bp, Artificial Sequence
  chemically synthesized
tggagagcttgcagaatcat

SEQ ID NO: 65819 - DNA, 20 bp, Artificial Sequence
  chemically synthesized
ccttgtaaattactcacctt

SEQ ID NO: 65820 - DNA, 20 bp, Artificial Sequence
  chemically synthesized
cttgtaaattactcaccttc

SEQ ID NO: 65821 - DNA, 20 bp, Artificial Sequence
  chemically synthesized
ccttcaggtattcctttata

SEQ ID NO: 65822 - DNA, 20 bp, Artificial Sequence
  chemically synthesized
tcctttatatagcaacacaa

SEQ ID NO: 65823 - DNA, 20 bp, Artificial Sequence
  chemically synthesized
cctttatatagcaacacaaa

SEQ ID NO: 65824 - DNA, 20 bp, Artificial Sequence
  chemically synthesized
tatagcaacacaaaaggact

SEQ ID NO: 65825 - DNA, 20 bp, Artificial Sequence
  chemically synthesized
gcaacacaaaaggactaaga

SEQ ID NO: 65826 - DNA, 20 bp, Artificial Sequence
  chemically synthesized
acacaaaaggactaagacag

SEQ ID NO: 65827 - DNA, 20 bp, Artificial Sequence
  chemically synthesized
cttgacttttctctctcttt

SEQ ID NO: 65828 - DNA, 20 bp, Artificial Sequence
  chemically synthesized
gacttttctctctctttaag

SEQ ID NO: 65829 - DNA, 20 bp, Artificial Sequence
  chemically synthesized
aagtgttgcctttgctcact

SEQ ID NO: 65830 - DNA, 20 bp, Artificial Sequence
  chemically synthesized
atcccttctgcctgcatttg

SEQ ID NO: 65831 - DNA, 20 bp, Artificial Sequence
  chemically synthesized
cccttctgcctgcatttgta

SEQ ID NO: 65832 - DNA, 20 bp, Artificial Sequence
  chemically synthesized
gcctgcatttgtagagcatc

SEQ ID NO: 65833 - DNA, 20 bp, Artificial Sequence
  chemically synthesized
gcatttgtagagcatctgga

SEQ ID NO: 65834 - DNA, 20 bp, Artificial Sequence
  chemically synthesized
catttgtagagcatctggat

SEQ ID NO: 65835 - DNA, 20 bp, Artificial Sequence
  chemically synthesized
tttgtagagcatctggatgg

SEQ ID NO: 65836 - DNA, 20 bp, Artificial Sequence
  chemically synthesized
accgtcactcttgactttcc

SEQ ID NO: 65837 - DNA, 20 bp, Artificial Sequence
  chemically synthesized
gtcactcttgactttcccag

SEQ ID NO: 65838 - DNA, 20 bp, Artificial Sequence
  chemically synthesized
tcactcttgactttcccagc

SEQ ID NO: 65839 - DNA, 20 bp, Artificial Sequence
  chemically synthesized
ttcccagcaggcctatgtca

SEQ ID NO: 65840 - DNA, 20 bp, Artificial Sequence
  chemically synthesized
tcccagcaggcctatgtcat

SEQ ID NO: 65841 - DNA, 20 bp, Artificial Sequence
  chemically synthesized
ggcctatgtcataggtactg

SEQ ID NO: 65842 - DNA, 20 bp, Artificial Sequence
  chemically synthesized
gtactgtggtctctacaata

SEQ ID NO: 65843 - DNA, 20 bp, Artificial Sequence
  chemically synthesized
ctgtggtctctacaatacag

SEQ ID NO: 65844 - DNA, 20 bp, Artificial Sequence
  chemically synthesized
gtggtctctacaatacagca

SEQ ID NO: 65845 - DNA, 20 bp, Artificial Sequence
  chemically synthesized
tggtctctacaatacagcag

SEQ ID NO: 65846 - DNA, 20 bp, Artificial Sequence
  chemically synthesized
acaatacagcagaggtatct

SEQ ID NO: 65847 - DNA, 20 bp, Artificial Sequence
  chemically synthesized
caatacagcagaggtatctg

SEQ ID NO: 65848 - DNA, 20 bp, Artificial Sequence
  chemically synthesized
gcagaggtatctgaggctcc

SEQ ID NO: 65849 - DNA, 20 bp, Artificial Sequence
  chemically synthesized
agaggtatctgaggctccga

SEQ ID NO: 65850 - DNA, 20 bp, Artificial Sequence
  chemically synthesized
gaggtatctgaggctccgag

SEQ ID NO: 65851 - DNA, 20 bp, Artificial Sequence
  chemically synthesized
atctgaggctccgagaggtt

SEQ ID NO: 65852 - DNA, 20 bp, Artificial Sequence
  chemically synthesized
gaggttgagtgacttgctca

SEQ ID NO: 65853 - DNA, 20 bp, Artificial Sequence
  chemically synthesized
cttgctcatggctgcacaac

SEQ ID NO: 65854 - DNA, 20 bp, Artificial Sequence
  chemically synthesized
gctgcacaaccagtaaatat

SEQ ID NO: 65855 - DNA, 20 bp, Artificial Sequence
  chemically synthesized
tgcacaaccagtaaatattg

SEQ ID NO: 65856 - DNA, 20 bp, Artificial Sequence
  chemically synthesized
caaccagtaaatattggagc

SEQ ID NO: 65857 - DNA, 20 bp, Artificial Sequence
  chemically synthesized
taaatattggagctggaatt

SEQ ID NO: 65858 - DNA, 20 bp, Artificial Sequence
  chemically synthesized
aaatattggagctggaattc

SEQ ID NO: 65859 - DNA, 20 bp, Artificial Sequence
  chemically synthesized
ggagctggaattcaggtcca

SEQ ID NO: 65860 - DNA, 20 bp, Artificial Sequence
  chemically synthesized
aattcaggtccacggtttcc

SEQ ID NO: 65861 - DNA, 20 bp, Artificial Sequence
  chemically synthesized
tccacggtttcctggctcca

SEQ ID NO: 65862 - DNA, 20 bp, Artificial Sequence
  chemically synthesized
ttccctcaatttattctgac

SEQ ID NO: 65863 - DNA, 20 bp, Artificial Sequence
  chemically synthesized
tccctcaatttattctgact

SEQ ID NO: 65864 - DNA, 20 bp, Artificial Sequence
  chemically synthesized
ccctcaatttattctgactg

SEQ ID NO: 65865 - DNA, 20 bp, Artificial Sequence
  chemically synthesized
aatttattctgactggggca

SEQ ID NO: 65866 - DNA, 20 bp, Artificial Sequence
  chemically synthesized
atttattctgactggggcat

SEQ ID NO: 65867 - DNA, 20 bp, Artificial Sequence
  chemically synthesized
tttattctgactggggcatg

SEQ ID NO: 65868 - DNA, 20 bp, Artificial Sequence
  chemically synthesized
ttattctgactggggcatgg

SEQ ID NO: 65869 - DNA, 20 bp, Artificial Sequence
  chemically synthesized
attctgactggggcatgggg

SEQ ID NO: 65870 - DNA, 20 bp, Artificial Sequence
  chemically synthesized
ttctgactggggcatggggg

SEQ ID NO: 65871 - DNA, 20 bp, Artificial Sequence
  chemically synthesized
tctgactggggcatggggga

SEQ ID NO: 65872 - DNA, 20 bp, Artificial Sequence
  chemically synthesized
ctgactggggcatgggggag

SEQ ID NO: 65873 - DNA, 20 bp, Artificial Sequence
  chemically synthesized
tgactggggcatgggggagg

SEQ ID NO: 65874 - DNA, 20 bp, Artificial Sequence
  chemically synthesized
ctggggcatgggggaggggg

SEQ ID NO: 65875 - DNA, 20 bp, Artificial Sequence
  chemically synthesized
atgggggagggggtggcctt

SEQ ID NO: 65876 - DNA, 20 bp, Artificial Sequence
  chemically synthesized
tgggggagggggtggccttt

SEQ ID NO: 65877 - DNA, 20 bp, Artificial Sequence
  chemically synthesized
gggagggggtggcctttggg

SEQ ID NO: 65878 - DNA, 20 bp, Artificial Sequence
  chemically synthesized
ggagggggtggcctttgggc

SEQ ID NO: 65879 - DNA, 20 bp, Artificial Sequence
  chemically synthesized
gagggggtggcctttgggca

SEQ ID NO: 65880 - DNA, 20 bp, Artificial Sequence
  chemically synthesized
tggcctttgggcagggccac

SEQ ID NO: 65881 - DNA, 20 bp, Artificial Sequence
  chemically synthesized
ggcctttgggcagggccacc

SEQ ID NO: 65882 - DNA, 20 bp, Artificial Sequence
  chemically synthesized
cctttgggcagggccaccag

SEQ ID NO: 65883 - DNA, 20 bp, Artificial Sequence
  chemically synthesized
gcagggccaccaggagcgac

SEQ ID NO: 65884 - DNA, 20 bp, Artificial Sequence
  chemically synthesized
cagggccaccaggagcgacc

SEQ ID NO: 65885 - DNA, 20 bp, Artificial Sequence
  chemically synthesized
accaggagcgaccaggcccg

SEQ ID NO: 65886 - DNA, 20 bp, Artificial Sequence
  chemically synthesized
caggagcgaccaggcccgta

SEQ ID NO: 65887 - DNA, 20 bp, Artificial Sequence
  chemically synthesized
ggagcgaccaggcccgtaga

SEQ ID NO: 65888 - DNA, 20 bp, Artificial Sequence
  chemically synthesized
cgaccaggcccgtagagagc

SEQ ID NO: 65889 - DNA, 20 bp, Artificial Sequence
  chemically synthesized
gaccaggcccgtagagagct

SEQ ID NO: 65890 - DNA, 20 bp, Artificial Sequence
  chemically synthesized
ggcccgtagagagctgggtg

SEQ ID NO: 65891 - DNA, 20 bp, Artificial Sequence
  chemically synthesized
gcccgtagagagctgggtgc

SEQ ID NO: 65892 - DNA, 20 bp, Artificial Sequence
  chemically synthesized
tagagagctgggtgcaggta

SEQ ID NO: 65893 - DNA, 20 bp, Artificial Sequence
  chemically synthesized
gagagctgggtgcaggtaca

SEQ ID NO: 65894 - DNA, 20 bp, Artificial Sequence
  chemically synthesized
agagctgggtgcaggtacag

SEQ ID NO: 65895 - DNA, 20 bp, Artificial Sequence
  chemically synthesized
acagaggaaaacctgttgtc

SEQ ID NO: 65896 - DNA, 20 bp, Artificial Sequence
  chemically synthesized
ggaaaacctgttgtcgagtg

SEQ ID NO: 65897 - DNA, 20 bp, Artificial Sequence
  chemically synthesized
ctgttgtcgagtgtggcccg

SEQ ID NO: 65898 - DNA, 20 bp, Artificial Sequence
  chemically synthesized
agttcccatttttgcctgaa

SEQ ID NO: 65899 - DNA, 20 bp, Artificial Sequence
  chemically synthesized
tgcctgaatggcacatttga

SEQ ID NO: 65900 - DNA, 20 bp, Artificial Sequence
  chemically synthesized
tataaccatgtgaataataa

SEQ ID NO: 65901 - DNA, 20 bp, Artificial Sequence
  chemically synthesized
accatgtgaataataatagt

SEQ ID NO: 65902 - DNA, 20 bp, Artificial Sequence
  chemically synthesized
taataatagttggcctatat

SEQ ID NO: 65903 - DNA, 20 bp, Artificial Sequence
  chemically synthesized
gagttctttaatttgctttt

SEQ ID NO: 65904 - DNA, 20 bp, Artificial Sequence
  chemically synthesized
tttgctttttggtccgcatt

SEQ ID NO: 65905 - DNA, 20 bp, Artificial Sequence
  chemically synthesized
tctcttttgttgtaatttgt

SEQ ID NO: 65906 - DNA, 20 bp, Artificial Sequence
  chemically synthesized
cttttgttgtaatttgtaag

SEQ ID NO: 65907 - DNA, 20 bp, Artificial Sequence
  chemically synthesized
ttttgttgtaatttgtaagt

SEQ ID NO: 65908 - DNA, 20 bp, Artificial Sequence
  chemically synthesized
tttgttgtaatttgtaagta

SEQ ID NO: 65909 - DNA, 20 bp, Artificial Sequence
  chemically synthesized
ttgttgtaatttgtaagtag

SEQ ID NO: 65910 - DNA, 20 bp, Artificial Sequence
  chemically synthesized
tgtaatttgtaagtaggggt

SEQ ID NO: 65911 - DNA, 20 bp, Artificial Sequence
  chemically synthesized
ttgtaagtaggggtgagata

SEQ ID NO: 65912 - DNA, 20 bp, Artificial Sequence
  chemically synthesized
ggggtgagataaagtacacc

SEQ ID NO: 65913 - DNA, 20 bp, Artificial Sequence
  chemically synthesized
gggtgagataaagtacacct

SEQ ID NO: 65914 - DNA, 20 bp, Artificial Sequence
  chemically synthesized
ggtgagataaagtacaccta

SEQ ID NO: 65915 - DNA, 20 bp, Artificial Sequence
  chemically synthesized
aaagtacacctagggtttgc

SEQ ID NO: 65916 - DNA, 20 bp, Artificial Sequence
  chemically synthesized
aagtacacctagggtttgct

SEQ ID NO: 65917 - DNA, 20 bp, Artificial Sequence
  chemically synthesized
tcatcatgttcctccttgca

SEQ ID NO: 65918 - DNA, 20 bp, Artificial Sequence
  chemically synthesized
catcatgttcctccttgcat

SEQ ID NO: 65919 - DNA, 20 bp, Artificial Sequence
  chemically synthesized
atcatgttcctccttgcatg

SEQ ID NO: 65920 - DNA, 20 bp, Artificial Sequence
  chemically synthesized
tgttcctccttgcatggggc

SEQ ID NO: 65921 - DNA, 20 bp, Artificial Sequence
  chemically synthesized
gttcctccttgcatggggcc

SEQ ID NO: 65922 - DNA, 20 bp, Artificial Sequence
  chemically synthesized
ttgcatggggccaggatccg

SEQ ID NO: 65923 - DNA, 20 bp, Artificial Sequence
  chemically synthesized
gcatggggccaggatccgtg

SEQ ID NO: 65924 - DNA, 20 bp, Artificial Sequence
  chemically synthesized
catggggccaggatccgtgg

SEQ ID NO: 65925 - DNA, 20 bp, Artificial Sequence
  chemically synthesized
caggatccgtggaggttgcc

SEQ ID NO: 65926 - DNA, 20 bp, Artificial Sequence
  chemically synthesized
gaggttgcctggcacctacg

SEQ ID NO: 65927 - DNA, 20 bp, Artificial Sequence
  chemically synthesized
gttgcctggcacctacgtgg

SEQ ID NO: 65928 - DNA, 20 bp, Artificial Sequence
  chemically synthesized
gcacctacgtggtggtgctg

SEQ ID NO: 65929 - DNA, 20 bp, Artificial Sequence
  chemically synthesized
cacctacgtggtggtgctga

SEQ ID NO: 65930 - DNA, 20 bp, Artificial Sequence
  chemically synthesized
cctacgtggtggtgctgaag

SEQ ID NO: 65931 - DNA, 20 bp, Artificial Sequence
  chemically synthesized
ctacgtggtggtgctgaagg

SEQ ID NO: 65932 - DNA, 20 bp, Artificial Sequence
  chemically synthesized
acgtggtggtgctgaaggag

SEQ ID NO: 65933 - DNA, 20 bp, Artificial Sequence
  chemically synthesized
aggaggagacccacctctcg

SEQ ID NO: 65934 - DNA, 20 bp, Artificial Sequence
  chemically synthesized
ggagacccacctctcgcagt

SEQ ID NO: 65935 - DNA, 20 bp, Artificial Sequence
  chemically synthesized
agacccacctctcgcagtca

SEQ ID NO: 65936 - DNA, 20 bp, Artificial Sequence
  chemically synthesized
agcgcactgcccgccgcctg

SEQ ID NO: 65937 - DNA, 20 bp, Artificial Sequence
  chemically synthesized
gcgcactgcccgccgcctgc

SEQ ID NO: 65938 - DNA, 20 bp, Artificial Sequence
  chemically synthesized
ctgcccgccgcctgcaggcc

SEQ ID NO: 65939 - DNA, 20 bp, Artificial Sequence
  chemically synthesized
tgcccgccgcctgcaggccc

SEQ ID NO: 65940 - DNA, 20 bp, Artificial Sequence
  chemically synthesized
tgcaggcccaggctgcccgc

SEQ ID NO: 65941 - DNA, 20 bp, Artificial Sequence
  chemically synthesized
gcaggcccaggctgcccgcc

SEQ ID NO: 65942 - DNA, 20 bp, Artificial Sequence
  chemically synthesized
caggcccaggctgcccgccg

SEQ ID NO: 65943 - DNA, 20 bp, Artificial Sequence
  chemically synthesized
cccgccggggatacctcacc

SEQ ID NO: 65944 - DNA, 20 bp, Artificial Sequence
  chemically synthesized
aagatcctgcatgtcttcca

SEQ ID NO: 65945 - DNA, 20 bp, Artificial Sequence
  chemically synthesized
gtcttccatggccttcttcc

SEQ ID NO: 65946 - DNA, 20 bp, Artificial Sequence
  chemically synthesized
tggccttcttcctggcttcc

SEQ ID NO: 65947 - DNA, 20 bp, Artificial Sequence
  chemically synthesized
ttcttcctggcttcctggtg

SEQ ID NO: 65948 - DNA, 20 bp, Artificial Sequence
  chemically synthesized
cctggcttcctggtgaagat

SEQ ID NO: 65949 - DNA, 20 bp, Artificial Sequence
  chemically synthesized
ggcttcctggtgaagatgag

SEQ ID NO: 65950 - DNA, 20 bp, Artificial Sequence
  chemically synthesized
gaagatgagtggcgacctgc

SEQ ID NO: 65951 - DNA, 20 bp, Artificial Sequence
  chemically synthesized
agatgagtggcgacctgctg

SEQ ID NO: 65952 - DNA, 20 bp, Artificial Sequence
  chemically synthesized
gagtggcgacctgctggagc

SEQ ID NO: 65953 - DNA, 20 bp, Artificial Sequence
  chemically synthesized
ggcgacctgctggagctggt

SEQ ID NO: 65954 - DNA, 20 bp, Artificial Sequence
  chemically synthesized
agctggtgagccaccctttt

SEQ ID NO: 65955 - DNA, 20 bp, Artificial Sequence
  chemically synthesized
gctggtgagccacccttttt

SEQ ID NO: 65956 - DNA, 20 bp, Artificial Sequence
  chemically synthesized
tgagccaccctttttgggaa

SEQ ID NO: 65957 - DNA, 20 bp, Artificial Sequence
  chemically synthesized
ttgggaatggcacttcctga

SEQ ID NO: 65958 - DNA, 20 bp, Artificial Sequence
  chemically synthesized
tgggaatggcacttcctgat

SEQ ID NO: 65959 - DNA, 20 bp, Artificial Sequence
  chemically synthesized
gggaatggcacttcctgata

SEQ ID NO: 65960 - DNA, 20 bp, Artificial Sequence
  chemically synthesized
atggcacttcctgatagggc

SEQ ID NO: 65961 - DNA, 20 bp, Artificial Sequence
  chemically synthesized
tggcacttcctgatagggct

SEQ ID NO: 65962 - DNA, 20 bp, Artificial Sequence
  chemically synthesized
ctgggccactgcatatacac

SEQ ID NO: 65963 - DNA, 20 bp, Artificial Sequence
  chemically synthesized
tgggccactgcatatacact

SEQ ID NO: 65964 - DNA, 20 bp, Artificial Sequence
  chemically synthesized
gggccactgcatatacactg

SEQ ID NO: 65965 - DNA, 20 bp, Artificial Sequence
  chemically synthesized
tatacactggggactgtgct

SEQ ID NO: 65966 - DNA, 20 bp, Artificial Sequence
  chemically synthesized
acactggggactgtgcttag

SEQ ID NO: 65967 - DNA, 20 bp, Artificial Sequence
  chemically synthesized
cactggggactgtgcttagt

SEQ ID NO: 65968 - DNA, 20 bp, Artificial Sequence
  chemically synthesized
gtaggcccattgctgaaaat

SEQ ID NO: 65969 - DNA, 20 bp, Artificial Sequence
  chemically synthesized
ggcccattgctgaaaatcag

SEQ ID NO: 65970 - DNA, 20 bp, Artificial Sequence
  chemically synthesized
gcccattgctgaaaatcaga

SEQ ID NO: 65971 - DNA, 20 bp, Artificial Sequence
  chemically synthesized
cccattgctgaaaatcagaa

SEQ ID NO: 65972 - DNA, 20 bp, Artificial Sequence
  chemically synthesized
ccattgctgaaaatcagaag

SEQ ID NO: 65973 - DNA, 20 bp, Artificial Sequence
  chemically synthesized
tgctgaaaatcagaagggga

SEQ ID NO: 65974 - DNA, 20 bp, Artificial Sequence
  chemically synthesized
gaaaatcagaaggggacagc

SEQ ID NO: 65975 - DNA, 20 bp, Artificial Sequence
  chemically synthesized
ggggacagcaagtatgtatt

SEQ ID NO: 65976 - DNA, 20 bp, Artificial Sequence
  chemically synthesized
agtatgtattgagcacttat

SEQ ID NO: 65977 - DNA, 20 bp, Artificial Sequence
  chemically synthesized
gtatgtattgagcacttatc

SEQ ID NO: 65978 - DNA, 20 bp, Artificial Sequence
  chemically synthesized
ttgagcacttatcgggtacc

SEQ ID NO: 65979 - DNA, 20 bp, Artificial Sequence
  chemically synthesized
cacttatcgggtaccaagca

SEQ ID NO: 65980 - DNA, 20 bp, Artificial Sequence
  chemically synthesized
gtaccaagcacagtaactac

SEQ ID NO: 65981 - DNA, 20 bp, Artificial Sequence
  chemically synthesized
gtaactactggctttctgta

SEQ ID NO: 65982 - DNA, 20 bp, Artificial Sequence
  chemically synthesized
ttctgtatagaattcccttt

SEQ ID NO: 65983 - DNA, 20 bp, Artificial Sequence
  chemically synthesized
tatagaattccctttaagcc

SEQ ID NO: 65984 - DNA, 20 bp, Artificial Sequence
  chemically synthesized
ctttaagcctggccatgccc

SEQ ID NO: 65985 - DNA, 20 bp, Artificial Sequence
  chemically synthesized
taagcctggccatgccccag

SEQ ID NO: 65986 - DNA, 20 bp, Artificial Sequence
  chemically synthesized
gtacgtctatcttcatttga

SEQ ID NO: 65987 - DNA, 20 bp, Artificial Sequence
  chemically synthesized
tctatcttcatttgaaagac

SEQ ID NO: 65988 - DNA, 20 bp, Artificial Sequence
  chemically synthesized
ctatcttcatttgaaagacg

SEQ ID NO: 65989 - DNA, 20 bp, Artificial Sequence
  chemically synthesized
atcttcatttgaaagacgag

SEQ ID NO: 65990 - DNA, 20 bp, Artificial Sequence
  chemically synthesized
tttgaaagacgaggagactg

SEQ ID NO: 65991 - DNA, 20 bp, Artificial Sequence
  chemically synthesized
aagacgaggagactgaagtt

SEQ ID NO: 65992 - DNA, 20 bp, Artificial Sequence
  chemically synthesized
gacgaggagactgaagttca

SEQ ID NO: 65993 - DNA, 20 bp, Artificial Sequence
  chemically synthesized
acgaggagactgaagttcag

SEQ ID NO: 65994 - DNA, 20 bp, Artificial Sequence
  chemically synthesized
cgaggagactgaagttcaga

SEQ ID NO: 65995 - DNA, 20 bp, Artificial Sequence
  chemically synthesized
gaggagactgaagttcagag

SEQ ID NO: 65996 - DNA, 20 bp, Artificial Sequence
  chemically synthesized
gaagttcagaggggaccaca

SEQ ID NO: 65997 - DNA, 20 bp, Artificial Sequence
  chemically synthesized
ttcagaggggaccacacaga

SEQ ID NO: 65998 - DNA, 20 bp, Artificial Sequence
  chemically synthesized
gaggggaccacacagacagc

SEQ ID NO: 65999 - DNA, 20 bp, Artificial Sequence
  chemically synthesized
aggggaccacacagacagct

SEQ ID NO: 66000 - DNA, 20 bp, Artificial Sequence
  chemically synthesized
ggggaccacacagacagcta

SEQ ID NO: 66001 - DNA, 20 bp, Artificial Sequence
  chemically synthesized
gggaccacacagacagctag

SEQ ID NO: 66002 - DNA, 20 bp, Artificial Sequence
  chemically synthesized
accacacagacagctagggg

SEQ ID NO: 66003 - DNA, 20 bp, Artificial Sequence
  chemically synthesized
cacacagacagctaggggta

SEQ ID NO: 66004 - DNA, 20 bp, Artificial Sequence
  chemically synthesized
agacagctaggggtagagcc

SEQ ID NO: 66005 - DNA, 20 bp, Artificial Sequence
  chemically synthesized
agagcctggatcaaacccat

SEQ ID NO: 66006 - DNA, 20 bp, Artificial Sequence
  chemically synthesized
aaacccattggtctgcctgc

SEQ ID NO: 66007 - DNA, 20 bp, Artificial Sequence
  chemically synthesized
gccaatgcatctgctgccta

SEQ ID NO: 66008 - DNA, 20 bp, Artificial Sequence
  chemically synthesized
ctgctgcctacggaaacctg

SEQ ID NO: 66009 - DNA, 20 bp, Artificial Sequence
  chemically synthesized
tgctgcctacggaaacctgt

SEQ ID NO: 66010 - DNA, 20 bp, Artificial Sequence
  chemically synthesized
gctgcctacggaaacctgta

SEQ ID NO: 66011 - DNA, 20 bp, Artificial Sequence
  chemically synthesized
ctacggaaacctgtagggac

SEQ ID NO: 66012 - DNA, 20 bp, Artificial Sequence
  chemically synthesized
tacggaaacctgtagggaca

SEQ ID NO: 66013 - DNA, 20 bp, Artificial Sequence
  chemically synthesized
aacctgtagggacaaggccc

SEQ ID NO: 66014 - DNA, 20 bp, Artificial Sequence
  chemically synthesized
acctgtagggacaaggccct

SEQ ID NO: 66015 - DNA, 20 bp, Artificial Sequence
  chemically synthesized
ggacaaggccctgggatgtt

SEQ ID NO: 66016 - DNA, 20 bp, Artificial Sequence
  chemically synthesized
caaggccctgggatgttcag

SEQ ID NO: 66017 - DNA, 20 bp, Artificial Sequence
  chemically synthesized
aggccctgggatgttcagtg

SEQ ID NO: 66018 - DNA, 20 bp, Artificial Sequence
  chemically synthesized
tgggatgttcagtggagcct

SEQ ID NO: 66019 - DNA, 20 bp, Artificial Sequence
  chemically synthesized
gcctgagtcattttataaaa

SEQ ID NO: 66020 - DNA, 20 bp, Artificial Sequence
  chemically synthesized
tttataaaaaagcatgactc

SEQ ID NO: 66021 - DNA, 20 bp, Artificial Sequence
  chemically synthesized
ttataaaaaagcatgactct

SEQ ID NO: 66022 - DNA, 20 bp, Artificial Sequence
  chemically synthesized
tataaaaaagcatgactcta

SEQ ID NO: 66023 - DNA, 20 bp, Artificial Sequence
  chemically synthesized
tagggtccaaaattcctttg

SEQ ID NO: 66024 - DNA, 20 bp, Artificial Sequence
  chemically synthesized
cctttgaagctgttgctatc

SEQ ID NO: 66025 - DNA, 20 bp, Artificial Sequence
  chemically synthesized
tttgaagctgttgctatcca

SEQ ID NO: 66026 - DNA, 20 bp, Artificial Sequence
  chemically synthesized
agctgttgctatccagagtg

SEQ ID NO: 66027 - DNA, 20 bp, Artificial Sequence
  chemically synthesized
ccagagtgaagtcccttctt

SEQ ID NO: 66028 - DNA, 20 bp, Artificial Sequence
  chemically synthesized
cagagtgaagtcccttcttt

SEQ ID NO: 66029 - DNA, 20 bp, Artificial Sequence
  chemically synthesized
gtgaagtcccttctttagga

SEQ ID NO: 66030 - DNA, 20 bp, Artificial Sequence
  chemically synthesized
tgaagtcccttctttaggac

SEQ ID NO: 66031 - DNA, 20 bp, Artificial Sequence
  chemically synthesized
gaagtcccttctttaggaca

SEQ ID NO: 66032 - DNA, 20 bp, Artificial Sequence
  chemically synthesized
gtcccttctttaggacaggg

SEQ ID NO: 66033 - DNA, 20 bp, Artificial Sequence
  chemically synthesized
agggtggccctcctccctcc

SEQ ID NO: 66034 - DNA, 20 bp, Artificial Sequence
  chemically synthesized
cctcctggatgtcacatctt

SEQ ID NO: 66035 - DNA, 20 bp, Artificial Sequence
  chemically synthesized
cctggatgtcacatcttcgg

SEQ ID NO: 66036 - DNA, 20 bp, Artificial Sequence
  chemically synthesized
tggatgtcacatcttcggtg

SEQ ID NO: 66037 - DNA, 20 bp, Artificial Sequence
  chemically synthesized
ggatgtcacatcttcggtgg

SEQ ID NO: 66038 - DNA, 20 bp, Artificial Sequence
  chemically synthesized
gatgtcacatcttcggtgga

SEQ ID NO: 66039 - DNA, 20 bp, Artificial Sequence
  chemically synthesized
atgtcacatcttcggtggag

SEQ ID NO: 66040 - DNA, 20 bp, Artificial Sequence
  chemically synthesized
tcacatcttcggtggagggg

SEQ ID NO: 66041 - DNA, 20 bp, Artificial Sequence
  chemically synthesized
atcttcggtggaggggcaga

SEQ ID NO: 66042 - DNA, 20 bp, Artificial Sequence
  chemically synthesized
tcttcggtggaggggcagaa

SEQ ID NO: 66043 - DNA, 20 bp, Artificial Sequence
  chemically synthesized
cttcggtggaggggcagaaa

SEQ ID NO: 66044 - DNA, 20 bp, Artificial Sequence
  chemically synthesized
ttcggtggaggggcagaaag

SEQ ID NO: 66045 - DNA, 20 bp, Artificial Sequence
  chemically synthesized
tggaggggcagaaaggggac

SEQ ID NO: 66046 - DNA, 20 bp, Artificial Sequence
  chemically synthesized
ggaggggcagaaaggggact

SEQ ID NO: 66047 - DNA, 20 bp, Artificial Sequence
  chemically synthesized
actgggtattctcctcaccc

SEQ ID NO: 66048 - DNA, 20 bp, Artificial Sequence
  chemically synthesized
tattctcctcaccctggccc

SEQ ID NO: 66049 - DNA, 20 bp, Artificial Sequence
  chemically synthesized
tgtgcttctgcaccaccttc

SEQ ID NO: 66050 - DNA, 20 bp, Artificial Sequence
  chemically synthesized
acaaataaaaacgttttttt

SEQ ID NO: 66051 - DNA, 20 bp, Artificial Sequence
  chemically synthesized
aaacgtttttttaagatttg

SEQ ID NO: 66052 - DNA, 20 bp, Artificial Sequence
  chemically synthesized
ttttttaagatttgaagcac

SEQ ID NO: 66053 - DNA, 20 bp, Artificial Sequence
  chemically synthesized
tttttaagatttgaagcact

SEQ ID NO: 66054 - DNA, 20 bp, Artificial Sequence
  chemically synthesized
ttttaagatttgaagcacta

SEQ ID NO: 66055 - DNA, 20 bp, Artificial Sequence
  chemically synthesized
aagatttgaagcactagggc

SEQ ID NO: 66056 - DNA, 20 bp, Artificial Sequence
  chemically synthesized
agatttgaagcactagggcc

SEQ ID NO: 66057 - DNA, 20 bp, Artificial Sequence
  chemically synthesized
gatttgaagcactagggcca

SEQ ID NO: 66058 - DNA, 20 bp, Artificial Sequence
  chemically synthesized
tgaagcactagggccagggt

SEQ ID NO: 66059 - DNA, 20 bp, Artificial Sequence
  chemically synthesized
gaagcactagggccagggtg

SEQ ID NO: 66060 - DNA, 20 bp, Artificial Sequence
  chemically synthesized
agcactagggccagggtgag

SEQ ID NO: 66061 - DNA, 20 bp, Artificial Sequence
  chemically synthesized
gccagggtgaggagaatacc

SEQ ID NO: 66062 - DNA, 20 bp, Artificial Sequence
  chemically synthesized
ccctttctgcccctccaccg

SEQ ID NO: 66063 - DNA, 20 bp, Artificial Sequence
  chemically synthesized
tccaccgaagatgtgacatc

SEQ ID NO: 66064 - DNA, 20 bp, Artificial Sequence
  chemically synthesized
ccaccgaagatgtgacatcc

SEQ ID NO: 66065 - DNA, 20 bp, Artificial Sequence
  chemically synthesized
accgaagatgtgacatccag

SEQ ID NO: 66066 - DNA, 20 bp, Artificial Sequence
  chemically synthesized
ccgaagatgtgacatccagg

SEQ ID NO: 66067 - DNA, 20 bp, Artificial Sequence
  chemically synthesized
cgaagatgtgacatccagga

SEQ ID NO: 66068 - DNA, 20 bp, Artificial Sequence
  chemically synthesized
aagatgtgacatccaggagg

SEQ ID NO: 66069 - DNA, 20 bp, Artificial Sequence
  chemically synthesized
agatgtgacatccaggaggg

SEQ ID NO: 66070 - DNA, 20 bp, Artificial Sequence
  chemically synthesized
atgtgacatccaggagggag

SEQ ID NO: 66071 - DNA, 20 bp, Artificial Sequence
  chemically synthesized
tgtgacatccaggagggagg

SEQ ID NO: 66072 - DNA, 20 bp, Artificial Sequence
  chemically synthesized
gtgacatccaggagggagga

SEQ ID NO: 66073 - DNA, 20 bp, Artificial Sequence
  chemically synthesized
aggagggccaccctgtccta

SEQ ID NO: 66074 - DNA, 20 bp, Artificial Sequence
  chemically synthesized
agggccaccctgtcctaaag

SEQ ID NO: 66075 - DNA, 20 bp, Artificial Sequence
  chemically synthesized
gggccaccctgtcctaaaga

SEQ ID NO: 66076 - DNA, 20 bp, Artificial Sequence
  chemically synthesized
ggccaccctgtcctaaagaa

SEQ ID NO: 66077 - DNA, 20 bp, Artificial Sequence
  chemically synthesized
ctaaagaagggacttcactc

SEQ ID NO: 66078 - DNA, 20 bp, Artificial Sequence
  chemically synthesized
agaagggacttcactctgga

SEQ ID NO: 66079 - DNA, 20 bp, Artificial Sequence
  chemically synthesized
gacttcactctggatagcaa

SEQ ID NO: 66080 - DNA, 20 bp, Artificial Sequence
  chemically synthesized
tctggatagcaacagcttca

SEQ ID NO: 66081 - DNA, 20 bp, Artificial Sequence
  chemically synthesized
ctggatagcaacagcttcaa

SEQ ID NO: 66082 - DNA, 20 bp, Artificial Sequence
  chemically synthesized
caacagcttcaaaggaattt

SEQ ID NO: 66083 - DNA, 20 bp, Artificial Sequence
  chemically synthesized
ttcaaaggaattttggaccc

SEQ ID NO: 66084 - DNA, 20 bp, Artificial Sequence
  chemically synthesized
caaaggaattttggacccta

SEQ ID NO: 66085 - DNA, 20 bp, Artificial Sequence
  chemically synthesized
tgcttttttataaaatgact

SEQ ID NO: 66086 - DNA, 20 bp, Artificial Sequence
  chemically synthesized
gcttttttataaaatgactc

SEQ ID NO: 66087 - DNA, 20 bp, Artificial Sequence
  chemically synthesized
tcaggctccactgaacatcc

SEQ ID NO: 66088 - DNA, 20 bp, Artificial Sequence
  chemically synthesized
caggctccactgaacatccc

SEQ ID NO: 66089 - DNA, 20 bp, Artificial Sequence
  chemically synthesized
aggctccactgaacatccca

SEQ ID NO: 66090 - DNA, 20 bp, Artificial Sequence
  chemically synthesized
atcccagggccttgtcccta

SEQ ID NO: 66091 - DNA, 20 bp, Artificial Sequence
  chemically synthesized
tcccagggccttgtccctac

SEQ ID NO: 66092 - DNA, 20 bp, Artificial Sequence
  chemically synthesized
cttgtccctacaggtttccg

SEQ ID NO: 66093 - DNA, 20 bp, Artificial Sequence
  chemically synthesized
ttgtccctacaggtttccgt

SEQ ID NO: 66094 - DNA, 20 bp, Artificial Sequence
  chemically synthesized
tccctacaggtttccgtagg

SEQ ID NO: 66095 - DNA, 20 bp, Artificial Sequence
  chemically synthesized
ctacaggtttccgtaggcag

SEQ ID NO: 66096 - DNA, 20 bp, Artificial Sequence
  chemically synthesized
tccgtaggcagcagatgcat

SEQ ID NO: 66097 - DNA, 20 bp, Artificial Sequence
  chemically synthesized
ggcagcagatgcattggcac

SEQ ID NO: 66098 - DNA, 20 bp, Artificial Sequence
  chemically synthesized
cagatgcattggcacaagaa

SEQ ID NO: 66099 - DNA, 20 bp, Artificial Sequence
  chemically synthesized
tgcattggcacaagaatggc

SEQ ID NO: 66100 - DNA, 20 bp, Artificial Sequence
  chemically synthesized
attggcacaagaatggctgg

SEQ ID NO: 66101 - DNA, 20 bp, Artificial Sequence
  chemically synthesized
ttggcacaagaatggctggc

SEQ ID NO: 66102 - DNA, 20 bp, Artificial Sequence
  chemically synthesized
gcacaagaatggctggcagg

SEQ ID NO: 66103 - DNA, 20 bp, Artificial Sequence
  chemically synthesized
atggctggcaggcagaccaa

SEQ ID NO: 66104 - DNA, 20 bp, Artificial Sequence
  chemically synthesized
tggctggcaggcagaccaat

SEQ ID NO: 66105 - DNA, 20 bp, Artificial Sequence
  chemically synthesized
gcagaccaatgggtttgatc

SEQ ID NO: 66106 - DNA, 20 bp, Artificial Sequence
  chemically synthesized
cagaccaatgggtttgatcc

SEQ ID NO: 66107 - DNA, 20 bp, Artificial Sequence
  chemically synthesized
tttgatccaggctctacccc

SEQ ID NO: 66108 - DNA, 20 bp, Artificial Sequence
  chemically synthesized
tctacccctagctgtctgtg

SEQ ID NO: 66109 - DNA, 20 bp, Artificial Sequence
  chemically synthesized
gtgtggtcccctctgaactt

SEQ ID NO: 66110 - DNA, 20 bp, Artificial Sequence
  chemically synthesized
gtctcctcgtctttcaaatg

SEQ ID NO: 66111 - DNA, 20 bp, Artificial Sequence
  chemically synthesized
cctcgtctttcaaatgaaga

SEQ ID NO: 66112 - DNA, 20 bp, Artificial Sequence
  chemically synthesized
aatgaagatagacgtaccac

SEQ ID NO: 66113 - DNA, 20 bp, Artificial Sequence
  chemically synthesized
atgaagatagacgtaccact

SEQ ID NO: 66114 - DNA, 20 bp, Artificial Sequence
  chemically synthesized
tgaagatagacgtaccactg

SEQ ID NO: 66115 - DNA, 20 bp, Artificial Sequence
  chemically synthesized
atagacgtaccactggggca

SEQ ID NO: 66116 - DNA, 20 bp, Artificial Sequence
  chemically synthesized
acgtaccactggggcatggc

SEQ ID NO: 66117 - DNA, 20 bp, Artificial Sequence
  chemically synthesized
cgtaccactggggcatggcc

SEQ ID NO: 66118 - DNA, 20 bp, Artificial Sequence
  chemically synthesized
ctggggcatggccaggctta

SEQ ID NO: 66119 - DNA, 20 bp, Artificial Sequence
  chemically synthesized
tggggcatggccaggcttaa

SEQ ID NO: 66120 - DNA, 20 bp, Artificial Sequence
  chemically synthesized
ggggcatggccaggcttaaa

SEQ ID NO: 66121 - DNA, 20 bp, Artificial Sequence
  chemically synthesized
ggcttaaagggaattctata

SEQ ID NO: 66122 - DNA, 20 bp, Artificial Sequence
  chemically synthesized
taaagggaattctatacaga

SEQ ID NO: 66123 - DNA, 20 bp, Artificial Sequence
  chemically synthesized
gggaattctatacagaaagc

SEQ ID NO: 66124 - DNA, 20 bp, Artificial Sequence
  chemically synthesized
aattctatacagaaagccag

SEQ ID NO: 66125 - DNA, 20 bp, Artificial Sequence
  chemically synthesized
aagccagtagttactgtgct

SEQ ID NO: 66126 - DNA, 20 bp, Artificial Sequence
  chemically synthesized
tactgtgcttggtacccgat

SEQ ID NO: 66127 - DNA, 20 bp, Artificial Sequence
  chemically synthesized
tgctgtccccttctgatttt

SEQ ID NO: 66128 - DNA, 20 bp, Artificial Sequence
  chemically synthesized
ccccttctgattttcagcaa

SEQ ID NO: 66129 - DNA, 20 bp, Artificial Sequence
  chemically synthesized
cccttctgattttcagcaat

SEQ ID NO: 66130 - DNA, 20 bp, Artificial Sequence
  chemically synthesized
ttttcagcaatgggcctact

SEQ ID NO: 66131 - DNA, 20 bp, Artificial Sequence
  chemically synthesized
agcaatgggcctactaagca

SEQ ID NO: 66132 - DNA, 20 bp, Artificial Sequence
  chemically synthesized
ggcctactaagcacagtccc

SEQ ID NO: 66133 - DNA, 20 bp, Artificial Sequence
  chemically synthesized
cacagtccccagtgtatatg

SEQ ID NO: 66134 - DNA, 20 bp, Artificial Sequence
  chemically synthesized
agtccccagtgtatatgcag

SEQ ID NO: 66135 - DNA, 20 bp, Artificial Sequence
  chemically synthesized
ccagtgtatatgcagtggcc

SEQ ID NO: 66136 - DNA, 20 bp, Artificial Sequence
  chemically synthesized
atgcagtggcccagccctat

SEQ ID NO: 66137 - DNA, 20 bp, Artificial Sequence
  chemically synthesized
tgcagtggcccagccctatc

SEQ ID NO: 66138 - DNA, 20 bp, Artificial Sequence
  chemically synthesized
agtggcccagccctatcagg

SEQ ID NO: 66139 - DNA, 20 bp, Artificial Sequence
  chemically synthesized
caggaagtgccattcccaaa

SEQ ID NO: 66140 - DNA, 20 bp, Artificial Sequence
  chemically synthesized
aggaagtgccattcccaaaa

SEQ ID NO: 66141 - DNA, 20 bp, Artificial Sequence
  chemically synthesized
ggaagtgccattcccaaaaa

SEQ ID NO: 66142 - DNA, 20 bp, Artificial Sequence
  chemically synthesized
agtgccattcccaaaaaggg

SEQ ID NO: 66143 - DNA, 20 bp, Artificial Sequence
  chemically synthesized
tcccaaaaagggtggctcac

SEQ ID NO: 66144 - DNA, 20 bp, Artificial Sequence
  chemically synthesized
aaagggtggctcaccagctc

SEQ ID NO: 66145 - DNA, 20 bp, Artificial Sequence
  chemically synthesized
gggtggctcaccagctccag

SEQ ID NO: 66146 - DNA, 20 bp, Artificial Sequence
  chemically synthesized
ggtggctcaccagctccagc

SEQ ID NO: 66147 - DNA, 20 bp, Artificial Sequence
  chemically synthesized
aggtcgccactcatcttcac

SEQ ID NO: 66148 - DNA, 20 bp, Artificial Sequence
  chemically synthesized
ggtcgccactcatcttcacc

SEQ ID NO: 66149 - DNA, 20 bp, Artificial Sequence
  chemically synthesized
cgccactcatcttcaccagg

SEQ ID NO: 66150 - DNA, 20 bp, Artificial Sequence
  chemically synthesized
actcatcttcaccaggaagc

SEQ ID NO: 66151 - DNA, 20 bp, Artificial Sequence
  chemically synthesized
ctcatcttcaccaggaagcc

SEQ ID NO: 66152 - DNA, 20 bp, Artificial Sequence
  chemically synthesized
atcttcaccaggaagccagg

SEQ ID NO: 66153 - DNA, 20 bp, Artificial Sequence
  chemically synthesized
ttcaccaggaagccaggaag

SEQ ID NO: 66154 - DNA, 20 bp, Artificial Sequence
  chemically synthesized
tcaccaggaagccaggaaga

SEQ ID NO: 66155 - DNA, 20 bp, Artificial Sequence
  chemically synthesized
ggaagccaggaagaaggcca

SEQ ID NO: 66156 - DNA, 20 bp, Artificial Sequence
  chemically synthesized
agccaggaagaaggccatgg

SEQ ID NO: 66157 - DNA, 20 bp, Artificial Sequence
  chemically synthesized
agaaggccatggaagacatg

SEQ ID NO: 66158 - DNA, 20 bp, Artificial Sequence
  chemically synthesized
gaaggccatggaagacatgc

SEQ ID NO: 66159 - DNA, 20 bp, Artificial Sequence
  chemically synthesized
atggaagacatgcaggatct

SEQ ID NO: 66160 - DNA, 20 bp, Artificial Sequence
  chemically synthesized
aagacatgcaggatcttggt

SEQ ID NO: 66161 - DNA, 20 bp, Artificial Sequence
  chemically synthesized
agacatgcaggatcttggtg

SEQ ID NO: 66162 - DNA, 20 bp, Artificial Sequence
  chemically synthesized
ggatcttggtgaggtatccc

SEQ ID NO: 66163 - DNA, 20 bp, Artificial Sequence
  chemically synthesized
tcttggtgaggtatccccgg

SEQ ID NO: 66164 - DNA, 20 bp, Artificial Sequence
  chemically synthesized
cttggtgaggtatccccggc

SEQ ID NO: 66165 - DNA, 20 bp, Artificial Sequence
  chemically synthesized
ggtgaggtatccccggcggg

SEQ ID NO: 66166 - DNA, 20 bp, Artificial Sequence
  chemically synthesized
ggtatccccggcgggcagcc

SEQ ID NO: 66167 - DNA, 20 bp, Artificial Sequence
  chemically synthesized
gtatccccggcgggcagcct

SEQ ID NO: 66168 - DNA, 20 bp, Artificial Sequence
  chemically synthesized
cggcgggcagcctgggcctg

SEQ ID NO: 66169 - DNA, 20 bp, Artificial Sequence
  chemically synthesized
ggcgggcagcctgggcctgc

SEQ ID NO: 66170 - DNA, 20 bp, Artificial Sequence
  chemically synthesized
gggcagcctgggcctgcagg

SEQ ID NO: 66171 - DNA, 20 bp, Artificial Sequence
  chemically synthesized
cagcctgggcctgcaggcgg

SEQ ID NO: 66172 - DNA, 20 bp, Artificial Sequence
  chemically synthesized
agcctgggcctgcaggcggc

SEQ ID NO: 66173 - DNA, 20 bp, Artificial Sequence
  chemically synthesized
ctgggcctgcaggcggcggg

SEQ ID NO: 66174 - DNA, 20 bp, Artificial Sequence
  chemically synthesized
gggcagtgcgctctgactgc

SEQ ID NO: 66175 - DNA, 20 bp, Artificial Sequence
  chemically synthesized
gcagtgcgctctgactgcga

SEQ ID NO: 66176 - DNA, 20 bp, Artificial Sequence
  chemically synthesized
cagtgcgctctgactgcgag

SEQ ID NO: 66177 - DNA, 20 bp, Artificial Sequence
  chemically synthesized
tgcgctctgactgcgagagg

SEQ ID NO: 66178 - DNA, 20 bp, Artificial Sequence
  chemically synthesized
gcgctctgactgcgagaggt

SEQ ID NO: 66179 - DNA, 20 bp, Artificial Sequence
  chemically synthesized
gagaggtgggtctcctcctt

SEQ ID NO: 66180 - DNA, 20 bp, Artificial Sequence
  chemically synthesized
cctccttcagcaccaccacg

SEQ ID NO: 66181 - DNA, 20 bp, Artificial Sequence
  chemically synthesized
ctccttcagcaccaccacgt

SEQ ID NO: 66182 - DNA, 20 bp, Artificial Sequence
  chemically synthesized
cagcaccaccacgtaggtgc

SEQ ID NO: 66183 - DNA, 20 bp, Artificial Sequence
  chemically synthesized
agcaccaccacgtaggtgcc

SEQ ID NO: 66184 - DNA, 20 bp, Artificial Sequence
  chemically synthesized
taggtgccaggcaacctcca

SEQ ID NO: 66185 - DNA, 20 bp, Artificial Sequence
  chemically synthesized
caggcaacctccacggatcc

SEQ ID NO: 66186 - DNA, 20 bp, Artificial Sequence
  chemically synthesized
cacggatcctggccccatgc

SEQ ID NO: 66187 - DNA, 20 bp, Artificial Sequence
  chemically synthesized
acggatcctggccccatgca

SEQ ID NO: 66188 - DNA, 20 bp, Artificial Sequence
  chemically synthesized
ggatcctggccccatgcaag

SEQ ID NO: 66189 - DNA, 20 bp, Artificial Sequence
  chemically synthesized
gatcctggccccatgcaagg

SEQ ID NO: 66190 - DNA, 20 bp, Artificial Sequence
  chemically synthesized
caaggaggaacatgatgaca

SEQ ID NO: 66191 - DNA, 20 bp, Artificial Sequence
  chemically synthesized
ggaggaacatgatgacatgg

SEQ ID NO: 66192 - DNA, 20 bp, Artificial Sequence
  chemically synthesized
atgatgacatggaagaaacc

SEQ ID NO: 66193 - DNA, 20 bp, Artificial Sequence
  chemically synthesized
ggaagaaacccagcaaaccc

SEQ ID NO: 66194 - DNA, 20 bp, Artificial Sequence
  chemically synthesized
gaagaaacccagcaaaccct

SEQ ID NO: 66195 - DNA, 20 bp, Artificial Sequence
  chemically synthesized
ctacttacaaattacaacaa

SEQ ID NO: 66196 - DNA, 20 bp, Artificial Sequence
  chemically synthesized
acttacaaattacaacaaaa

SEQ ID NO: 66197 - DNA, 20 bp, Artificial Sequence
  chemically synthesized
ttacaacaaaagagacacaa

SEQ ID NO: 66198 - DNA, 20 bp, Artificial Sequence
  chemically synthesized
acaacaaaagagacacaaca

SEQ ID NO: 66199 - DNA, 20 bp, Artificial Sequence
  chemically synthesized
aaaagagacacaacagagta

SEQ ID NO: 66200 - DNA, 20 bp, Artificial Sequence
  chemically synthesized
agagacacaacagagtatag

SEQ ID NO: 66201 - DNA, 20 bp, Artificial Sequence
  chemically synthesized
acagagtatagtagatgata

SEQ ID NO: 66202 - DNA, 20 bp, Artificial Sequence
  chemically synthesized
gagtatagtagatgataaag

SEQ ID NO: 66203 - DNA, 20 bp, Artificial Sequence
  chemically synthesized
gataaagaagttaccaaatg

SEQ ID NO: 66204 - DNA, 20 bp, Artificial Sequence
  chemically synthesized
gttaccaaatgcggaccaaa

SEQ ID NO: 66205 - DNA, 20 bp, Artificial Sequence
  chemically synthesized
gcggaccaaaaagcaaatta

SEQ ID NO: 66206 - DNA, 20 bp, Artificial Sequence
  chemically synthesized
agcaaattaaagaactcata

SEQ ID NO: 66207 - DNA, 20 bp, Artificial Sequence
  chemically synthesized
gcaaattaaagaactcatat

SEQ ID NO: 66208 - DNA, 20 bp, Artificial Sequence
  chemically synthesized
gccaactattattattcaca

SEQ ID NO: 66209 - DNA, 20 bp, Artificial Sequence
  chemically synthesized
acactttcaaatgtgccatt

SEQ ID NO: 66210 - DNA, 20 bp, Artificial Sequence
  chemically synthesized
cactttcaaatgtgccattc

SEQ ID NO: 66211 - DNA, 20 bp, Artificial Sequence
  chemically synthesized
atgtgccattcaggcaaaaa

SEQ ID NO: 66212 - DNA, 20 bp, Artificial Sequence
  chemically synthesized
tgtgccattcaggcaaaaat

SEQ ID NO: 66213 - DNA, 20 bp, Artificial Sequence
  chemically synthesized
tcaggcaaaaatgggaacta

SEQ ID NO: 66214 - DNA, 20 bp, Artificial Sequence
  chemically synthesized
caggcaaaaatgggaactac

SEQ ID NO: 66215 - DNA, 20 bp, Artificial Sequence
  chemically synthesized
ctacgggccacactcgacaa

SEQ ID NO: 66216 - DNA, 20 bp, Artificial Sequence
  chemically synthesized
tacgggccacactcgacaac

SEQ ID NO: 66217 - DNA, 20 bp, Artificial Sequence
  chemically synthesized
ttttcctctgtacctgcacc

SEQ ID NO: 66218 - DNA, 20 bp, Artificial Sequence
  chemically synthesized
tacctgcacccagctctcta

SEQ ID NO: 66219 - DNA, 20 bp, Artificial Sequence
  chemically synthesized
acctgcacccagctctctac

SEQ ID NO: 66220 - DNA, 20 bp, Artificial Sequence
  chemically synthesized
cacccagctctctacgggcc

SEQ ID NO: 66221 - DNA, 20 bp, Artificial Sequence
  chemically synthesized
tctacgggcctggtcgctcc

SEQ ID NO: 66222 - DNA, 20 bp, Artificial Sequence
  chemically synthesized
acgggcctggtcgctcctgg

SEQ ID NO: 66223 - DNA, 20 bp, Artificial Sequence
  chemically synthesized
gctcctggtggccctgccca

SEQ ID NO: 66224 - DNA, 20 bp, Artificial Sequence
  chemically synthesized
ctcctggtggccctgcccaa

SEQ ID NO: 66225 - DNA, 20 bp, Artificial Sequence
  chemically synthesized
ccaccccctcccccatgccc

SEQ ID NO: 66226 - DNA, 20 bp, Artificial Sequence
  chemically synthesized
cccctcccccatgccccagt

SEQ ID NO: 66227 - DNA, 20 bp, Artificial Sequence
  chemically synthesized
tgccccagtcagaataaatt

SEQ ID NO: 66228 - DNA, 20 bp, Artificial Sequence
  chemically synthesized
gccccagtcagaataaattg

SEQ ID NO: 66229 - DNA, 20 bp, Artificial Sequence
  chemically synthesized
ccccagtcagaataaattga

SEQ ID NO: 66230 - DNA, 20 bp, Artificial Sequence
  chemically synthesized
taaattgagggaaaaaatca

SEQ ID NO: 66231 - DNA, 20 bp, Artificial Sequence
  chemically synthesized
aaattgagggaaaaaatcat

SEQ ID NO: 66232 - DNA, 20 bp, Artificial Sequence
  chemically synthesized
agggaaaaaatcatgggctt

SEQ ID NO: 66233 - DNA, 20 bp, Artificial Sequence
  chemically synthesized
ggaaaaaatcatgggctttg

SEQ ID NO: 66234 - DNA, 20 bp, Artificial Sequence
  chemically synthesized
aaaatcatgggctttggagc

SEQ ID NO: 66235 - DNA, 20 bp, Artificial Sequence
  chemically synthesized
aaatcatgggctttggagcc

SEQ ID NO: 66236 - DNA, 20 bp, Artificial Sequence
  chemically synthesized
gctttggagccaggaaaccg

SEQ ID NO: 66237 - DNA, 20 bp, Artificial Sequence
  chemically synthesized
gaaaccgtggacctgaattc

SEQ ID NO: 66238 - DNA, 20 bp, Artificial Sequence
  chemically synthesized
attccagctccaatatttac

SEQ ID NO: 66239 - DNA, 20 bp, Artificial Sequence
  chemically synthesized
tccaatatttactggttgtg

SEQ ID NO: 66240 - DNA, 20 bp, Artificial Sequence
  chemically synthesized
tttactggttgtgcagccat

SEQ ID NO: 66241 - DNA, 20 bp, Artificial Sequence
  chemically synthesized
ctggttgtgcagccatgagc

SEQ ID NO: 66242 - DNA, 20 bp, Artificial Sequence
  chemically synthesized
gagcaagtcactcaacctct

SEQ ID NO: 66243 - DNA, 20 bp, Artificial Sequence
  chemically synthesized
gcaagtcactcaacctctcg

SEQ ID NO: 66244 - DNA, 20 bp, Artificial Sequence
  chemically synthesized
cactcaacctctcggagcct

SEQ ID NO: 66245 - DNA, 20 bp, Artificial Sequence
  chemically synthesized
cagatacctctgctgtattg

SEQ ID NO: 66246 - DNA, 20 bp, Artificial Sequence
  chemically synthesized
gatacctctgctgtattgta

SEQ ID NO: 66247 - DNA, 20 bp, Artificial Sequence
  chemically synthesized
ctgctgtattgtagagacca

SEQ ID NO: 66248 - DNA, 20 bp, Artificial Sequence
  chemically synthesized
agaccacagtacctatgaca

SEQ ID NO: 66249 - DNA, 20 bp, Artificial Sequence
  chemically synthesized
gaccacagtacctatgacat

SEQ ID NO: 66250 - DNA, 20 bp, Artificial Sequence
  chemically synthesized
tacctatgacataggcctgc

SEQ ID NO: 66251 - DNA, 20 bp, Artificial Sequence
  chemically synthesized
acctatgacataggcctgct

SEQ ID NO: 66252 - DNA, 20 bp, Artificial Sequence
  chemically synthesized
atgacataggcctgctggga

SEQ ID NO: 66253 - DNA, 20 bp, Artificial Sequence
  chemically synthesized
ataggcctgctgggaaagtc

SEQ ID NO: 66254 - DNA, 20 bp, Artificial Sequence
  chemically synthesized
aggcctgctgggaaagtcaa

SEQ ID NO: 66255 - DNA, 20 bp, Artificial Sequence
  chemically synthesized
gctgggaaagtcaagagtga

SEQ ID NO: 66256 - DNA, 20 bp, Artificial Sequence
  chemically synthesized
ggttatataaatctcccatc

SEQ ID NO: 66257 - DNA, 20 bp, Artificial Sequence
  chemically synthesized
atccagatgctctacaaatg

SEQ ID NO: 66258 - DNA, 20 bp, Artificial Sequence
  chemically synthesized
tccagatgctctacaaatgc

SEQ ID NO: 66259 - DNA, 20 bp, Artificial Sequence
  chemically synthesized
agatgctctacaaatgcagg

SEQ ID NO: 66260 - DNA, 20 bp, Artificial Sequence
  chemically synthesized
tgctctacaaatgcaggcag

SEQ ID NO: 66261 - DNA, 20 bp, Artificial Sequence
  chemically synthesized
gctctacaaatgcaggcaga

SEQ ID NO: 66262 - DNA, 20 bp, Artificial Sequence
  chemically synthesized
ctctacaaatgcaggcagaa

SEQ ID NO: 66263 - DNA, 20 bp, Artificial Sequence
  chemically synthesized
tgcaggcagaagggatgact

SEQ ID NO: 66264 - DNA, 20 bp, Artificial Sequence
  chemically synthesized
ggcagaagggatgactaagt

SEQ ID NO: 66265 - DNA, 20 bp, Artificial Sequence
  chemically synthesized
aagggatgactaagtgagca

SEQ ID NO: 66266 - DNA, 20 bp, Artificial Sequence
  chemically synthesized
agggatgactaagtgagcaa

SEQ ID NO: 66267 - DNA, 20 bp, Artificial Sequence
  chemically synthesized
agcaaaggcaacacttctta

SEQ ID NO: 66268 - DNA, 20 bp, Artificial Sequence
  chemically synthesized
caaaggcaacacttcttaaa

SEQ ID NO: 66269 - DNA, 20 bp, Artificial Sequence
  chemically synthesized
aaggcaacacttcttaaaga

SEQ ID NO: 66270 - DNA, 20 bp, Artificial Sequence
  chemically synthesized
ggcaacacttcttaaagaga

SEQ ID NO: 66271 - DNA, 20 bp, Artificial Sequence
  chemically synthesized
cacttcttaaagagagagaa

SEQ ID NO: 66272 - DNA, 20 bp, Artificial Sequence
  chemically synthesized
cttaaagagagagaaaagtc

SEQ ID NO: 66273 - DNA, 20 bp, Artificial Sequence
  chemically synthesized
ttaaagagagagaaaagtca

SEQ ID NO: 66274 - DNA, 20 bp, Artificial Sequence
  chemically synthesized
aaaagtcaaggccactgtct

SEQ ID NO: 66275 - DNA, 20 bp, Artificial Sequence
  chemically synthesized
tccttttgtgttgctatata

SEQ ID NO: 66276 - DNA, 20 bp, Artificial Sequence
  chemically synthesized
ccttttgtgttgctatataa

SEQ ID NO: 66277 - DNA, 20 bp, Artificial Sequence
  chemically synthesized
gctatataaaggaatacctg

SEQ ID NO: 66278 - DNA, 20 bp, Artificial Sequence
  chemically synthesized
ctatataaaggaatacctga

SEQ ID NO: 66279 - DNA, 20 bp, Artificial Sequence
  chemically synthesized
ataaaggaatacctgaaggt

SEQ ID NO: 66280 - DNA, 20 bp, Artificial Sequence
  chemically synthesized
cctgaaggtgagtaatttac

SEQ ID NO: 66281 - DNA, 20 bp, Artificial Sequence
  chemically synthesized
ctgaaggtgagtaatttaca

SEQ ID NO: 66282 - DNA, 20 bp, Artificial Sequence
  chemically synthesized
ggtgagtaatttacaaggaa

SEQ ID NO: 66283 - DNA, 20 bp, Artificial Sequence
  chemically synthesized
gtgagtaatttacaaggaaa

SEQ ID NO: 66284 - DNA, 20 bp, Artificial Sequence
  chemically synthesized
tgagtaatttacaaggaaaa

SEQ ID NO: 66285 - DNA, 20 bp, Artificial Sequence
  chemically synthesized
acaaggaaaagggatttatt

SEQ ID NO: 66286 - DNA, 20 bp, Artificial Sequence
  chemically synthesized
tattcagctcatgattctgc

SEQ ID NO: 66287 - DNA, 20 bp, Artificial Sequence
  chemically synthesized
tcatgattctgcaagctctc

SEQ ID NO: 66288 - DNA, 20 bp, Artificial Sequence
  chemically synthesized
catgattctgcaagctctcc

SEQ ID NO: 66289 - DNA, 20 bp, Artificial Sequence
  chemically synthesized
gattctgcaagctctccagg

SEQ ID NO: 66290 - DNA, 20 bp, Artificial Sequence
  chemically synthesized
tgcaagctctccaggaagca

SEQ ID NO: 66291 - DNA, 20 bp, Artificial Sequence
  chemically synthesized
ctctccaggaagcatggcac

SEQ ID NO: 66292 - DNA, 20 bp, Artificial Sequence
  chemically synthesized
atggcaccagcatctgcttc

SEQ ID NO: 66293 - DNA, 20 bp, Artificial Sequence
  chemically synthesized
caccagcatctgcttctggt

SEQ ID NO: 66294 - DNA, 20 bp, Artificial Sequence
  chemically synthesized
accagcatctgcttctggtg

SEQ ID NO: 66295 - DNA, 20 bp, Artificial Sequence
  chemically synthesized
ccagcatctgcttctggtga

SEQ ID NO: 66296 - DNA, 20 bp, Artificial Sequence
  chemically synthesized
ctgcttctggtgagggcctt

SEQ ID NO: 66297 - DNA, 20 bp, Artificial Sequence
  chemically synthesized
ccttaagctgctttcactga

SEQ ID NO: 66298 - DNA, 20 bp, Artificial Sequence
  chemically synthesized
taagctgctttcactgatgg

SEQ ID NO: 66299 - DNA, 20 bp, Artificial Sequence
  chemically synthesized
gctgctttcactgatggcag

SEQ ID NO: 66300 - DNA, 20 bp, Artificial Sequence
  chemically synthesized
ctgctttcactgatggcaga

SEQ ID NO: 66301 - DNA, 20 bp, Artificial Sequence
  chemically synthesized
ttcactgatggcagaaggtg

SEQ ID NO: 66302 - DNA, 20 bp, Artificial Sequence
  chemically synthesized
tcactgatggcagaaggtga

SEQ ID NO: 66303 - DNA, 20 bp, Artificial Sequence
  chemically synthesized
cactgatggcagaaggtgaa

SEQ ID NO: 66304 - DNA, 20 bp, Artificial Sequence
  chemically synthesized
actgatggcagaaggtgaag

SEQ ID NO: 66305 - DNA, 20 bp, Artificial Sequence
  chemically synthesized
tgatggcagaaggtgaaggg

SEQ ID NO: 66306 - DNA, 20 bp, Artificial Sequence
  chemically synthesized
tgaaggggagcctacatgtg

SEQ ID NO: 66307 - DNA, 20 bp, Artificial Sequence
  chemically synthesized
aaggggagcctacatgtgca

SEQ ID NO: 66308 - DNA, 20 bp, Artificial Sequence
  chemically synthesized
atgtgcagagatcaatcaca

SEQ ID NO: 66309 - DNA, 20 bp, Artificial Sequence
  chemically synthesized
gcagagatcaatcacatggc

SEQ ID NO: 66310 - DNA, 20 bp, Artificial Sequence
  chemically synthesized
agagatcaatcacatggcaa

SEQ ID NO: 66311 - DNA, 20 bp, Artificial Sequence
  chemically synthesized
gatcaatcacatggcaagag

SEQ ID NO: 66312 - DNA, 20 bp, Artificial Sequence
  chemically synthesized
caatcacatggcaagagaag

SEQ ID NO: 66313 - DNA, 20 bp, Artificial Sequence
  chemically synthesized
cacatggcaagagaagaagc

SEQ ID NO: 66314 - DNA, 20 bp, Artificial Sequence
  chemically synthesized
catggcaagagaagaagcaa

SEQ ID NO: 66315 - DNA, 20 bp, Artificial Sequence
  chemically synthesized
tggcaagagaagaagcaaga

SEQ ID NO: 66316 - DNA, 20 bp, Artificial Sequence
  chemically synthesized
caagagaagaagcaagagag

SEQ ID NO: 66317 - DNA, 20 bp, Artificial Sequence
  chemically synthesized
agagaagaagcaagagagaa

SEQ ID NO: 66318 - DNA, 20 bp, Artificial Sequence
  chemically synthesized
agaagaagcaagagagaaga

SEQ ID NO: 66319 - DNA, 20 bp, Artificial Sequence
  chemically synthesized
gaagaagcaagagagaagag

SEQ ID NO: 66320 - DNA, 20 bp, Artificial Sequence
  chemically synthesized
aagaagcaagagagaagaga

SEQ ID NO: 66321 - DNA, 20 bp, Artificial Sequence
  chemically synthesized
gaagcaagagagaagagagg

SEQ ID NO: 66322 - DNA, 20 bp, Artificial Sequence
  chemically synthesized
aagcaagagagaagagaggg

SEQ ID NO: 66323 - DNA, 20 bp, Artificial Sequence
  chemically synthesized
agagaagagagggaggtgcc

SEQ ID NO: 66324 - DNA, 20 bp, Artificial Sequence
  chemically synthesized
gccaagctctttttaataat

SEQ ID NO: 66325 - DNA, 20 bp, Artificial Sequence
  chemically synthesized
ctttttaataatcagccttc

SEQ ID NO: 66326 - DNA, 20 bp, Artificial Sequence
  chemically synthesized
tttttaataatcagccttca

SEQ ID NO: 66327 - DNA, 20 bp, Artificial Sequence
  chemically synthesized
ttttaataatcagccttcaa

SEQ ID NO: 66328 - DNA, 20 bp, Artificial Sequence
  chemically synthesized
tcagccttcaagggaaatca

SEQ ID NO: 66329 - DNA, 20 bp, Artificial Sequence
  chemically synthesized
gccttcaagggaaatcatag

SEQ ID NO: 66330 - DNA, 20 bp, Artificial Sequence
  chemically synthesized
ccttcaagggaaatcatagc

SEQ ID NO: 66331 - DNA, 20 bp, Artificial Sequence
  chemically synthesized
ttcaagggaaatcatagcgg

SEQ ID NO: 66332 - DNA, 20 bp, Artificial Sequence
  chemically synthesized
gagaacttactcattatcac

SEQ ID NO: 66333 - DNA, 20 bp, Artificial Sequence
  chemically synthesized
agaacttactcattatcaca

SEQ ID NO: 66334 - DNA, 20 bp, Artificial Sequence
  chemically synthesized
cttactcattatcacaagga

SEQ ID NO: 66335 - DNA, 20 bp, Artificial Sequence
  chemically synthesized
attatcacaaggacggcacc

SEQ ID NO: 66336 - DNA, 20 bp, Artificial Sequence
  chemically synthesized
ggacggcaccaagcctttca

SEQ ID NO: 66337 - DNA, 20 bp, Artificial Sequence
  chemically synthesized
gacggcaccaagcctttcac

SEQ ID NO: 66338 - DNA, 20 bp, Artificial Sequence
  chemically synthesized
acggcaccaagcctttcaca

SEQ ID NO: 66339 - DNA, 20 bp, Artificial Sequence
  chemically synthesized
cggcaccaagcctttcacag

SEQ ID NO: 66340 - DNA, 20 bp, Artificial Sequence
  chemically synthesized
atgacccaaacacctcccat

SEQ ID NO: 66341 - DNA, 20 bp, Artificial Sequence
  chemically synthesized
tgacccaaacacctcccatt

SEQ ID NO: 66342 - DNA, 20 bp, Artificial Sequence
  chemically synthesized
taggccccacttccaacact

SEQ ID NO: 66343 - DNA, 20 bp, Artificial Sequence
  chemically synthesized
aggccccacttccaacactg

SEQ ID NO: 66344 - DNA, 20 bp, Artificial Sequence
  chemically synthesized
tgaggaccaaatttccacat

SEQ ID NO: 66345 - DNA, 20 bp, Artificial Sequence
  chemically synthesized
ccaaatttccacatgagatt

SEQ ID NO: 66346 - DNA, 20 bp, Artificial Sequence
  chemically synthesized
aaatttccacatgagatttg

SEQ ID NO: 66347 - DNA, 20 bp, Artificial Sequence
  chemically synthesized
aatttccacatgagatttgg

SEQ ID NO: 66348 - DNA, 20 bp, Artificial Sequence
  chemically synthesized
atttccacatgagatttgga

SEQ ID NO: 66349 - DNA, 20 bp, Artificial Sequence
  chemically synthesized
tttccacatgagatttggag

SEQ ID NO: 66350 - DNA, 20 bp, Artificial Sequence
  chemically synthesized
tggaggggacaaacaaatta

SEQ ID NO: 66351 - DNA, 20 bp, Artificial Sequence
  chemically synthesized
aggggacaaacaaattatag

SEQ ID NO: 66352 - DNA, 20 bp, Artificial Sequence
  chemically synthesized
attatagcagccactatcta

SEQ ID NO: 66353 - DNA, 20 bp, Artificial Sequence
  chemically synthesized
actatctatggtgatttgtt

SEQ ID NO: 66354 - DNA, 20 bp, Artificial Sequence
  chemically synthesized
atggtgatttgtttggtttt

SEQ ID NO: 66355 - DNA, 20 bp, Artificial Sequence
  chemically synthesized
ttgtctgctccaactgctct

SEQ ID NO: 66356 - DNA, 20 bp, Artificial Sequence
  chemically synthesized
tgtctgctccaactgctctc

SEQ ID NO: 66357 - DNA, 20 bp, Artificial Sequence
  chemically synthesized
ctgctccaactgctctcagg

SEQ ID NO: 66358 - DNA, 20 bp, Artificial Sequence
  chemically synthesized
tcaggcagacatacctgctt

SEQ ID NO: 66359 - DNA, 20 bp, Artificial Sequence
  chemically synthesized
acctgcttaagaaccttcac

SEQ ID NO: 66360 - DNA, 20 bp, Artificial Sequence
  chemically synthesized
gaaccttcactggctcccca

SEQ ID NO: 66361 - DNA, 20 bp, Artificial Sequence
  chemically synthesized
tccccacagcctcatgaatc

SEQ ID NO: 66362 - DNA, 20 bp, Artificial Sequence
  chemically synthesized
ccaaactccatgctcctcct

SEQ ID NO: 66363 - DNA, 20 bp, Artificial Sequence
  chemically synthesized
ccctacctcaacctaccttg

SEQ ID NO: 66364 - DNA, 20 bp, Artificial Sequence
  chemically synthesized
atctctgtatatatgcatct

SEQ ID NO: 66365 - DNA, 20 bp, Artificial Sequence
  chemically synthesized
tatatatgcatcttggactc

SEQ ID NO: 66366 - DNA, 20 bp, Artificial Sequence
  chemically synthesized
tatgcatcttggactccagt

SEQ ID NO: 66367 - DNA, 20 bp, Artificial Sequence
  chemically synthesized
tgcatcttggactccagtca

SEQ ID NO: 66368 - DNA, 20 bp, Artificial Sequence
  chemically synthesized
atcttggactccagtcagag

SEQ ID NO: 66369 - DNA, 20 bp, Artificial Sequence
  chemically synthesized
ggactccagtcagagtagaa

SEQ ID NO: 66370 - DNA, 20 bp, Artificial Sequence
  chemically synthesized
actccagtcagagtagaaca

SEQ ID NO: 66371 - DNA, 20 bp, Artificial Sequence
  chemically synthesized
gagtccaccccctttaccca

SEQ ID NO: 66372 - DNA, 20 bp, Artificial Sequence
  chemically synthesized
accccctttacccaaagcct

SEQ ID NO: 66373 - DNA, 20 bp, Artificial Sequence
  chemically synthesized
ccccctttacccaaagcctt

SEQ ID NO: 66374 - DNA, 20 bp, Artificial Sequence
  chemically synthesized
cccctttacccaaagcctta

SEQ ID NO: 66375 - DNA, 20 bp, Artificial Sequence
  chemically synthesized
ccaaagccttagggccaaaa

SEQ ID NO: 66376 - DNA, 20 bp, Artificial Sequence
  chemically synthesized
gccaaaacggttttgaacct

SEQ ID NO: 66377 - DNA, 20 bp, Artificial Sequence
  chemically synthesized
tttgaacctcagaacttgtt

SEQ ID NO: 66378 - DNA, 20 bp, Artificial Sequence
  chemically synthesized
ctcagaacttgtttggattt

SEQ ID NO: 66379 - DNA, 20 bp, Artificial Sequence
  chemically synthesized
gaacttgtttggattttaga

SEQ ID NO: 66380 - DNA, 20 bp, Artificial Sequence
  chemically synthesized
aacttgtttggattttagaa

SEQ ID NO: 66381 - DNA, 20 bp, Artificial Sequence
  chemically synthesized
ttgtttggattttagaaagg

SEQ ID NO: 66382 - DNA, 20 bp, Artificial Sequence
  chemically synthesized
ggattttagaaaggcagtaa

SEQ ID NO: 66383 - DNA, 20 bp, Artificial Sequence
  chemically synthesized
gattttagaaaggcagtaat

SEQ ID NO: 66384 - DNA, 20 bp, Artificial Sequence
  chemically synthesized
gaaaggcagtaatgggcaat

SEQ ID NO: 66385 - DNA, 20 bp, Artificial Sequence
  chemically synthesized
aaggcagtaatgggcaatca

SEQ ID NO: 66386 - DNA, 20 bp, Artificial Sequence
  chemically synthesized
atgggcaatcagagtctgct

SEQ ID NO: 66387 - DNA, 20 bp, Artificial Sequence
  chemically synthesized
ggcaatcagagtctgcttgg

SEQ ID NO: 66388 - DNA, 20 bp, Artificial Sequence
  chemically synthesized
agagtctgcttggaagaatc

SEQ ID NO: 66389 - DNA, 20 bp, Artificial Sequence
  chemically synthesized
agtctgcttggaagaatctg

SEQ ID NO: 66390 - DNA, 20 bp, Artificial Sequence
  chemically synthesized
gctgcatactgtaatctatg

SEQ ID NO: 66391 - DNA, 20 bp, Artificial Sequence
  chemically synthesized
aattaaaaataatctcatgt

SEQ ID NO: 66392 - DNA, 20 bp, Artificial Sequence
  chemically synthesized
aatctcatgtcagttcacgt

SEQ ID NO: 66393 - DNA, 20 bp, Artificial Sequence
  chemically synthesized
atctcatgtcagttcacgtc

SEQ ID NO: 66394 - DNA, 20 bp, Artificial Sequence
  chemically synthesized
taaatcacaaaaaaaacttt

SEQ ID NO: 66395 - DNA, 20 bp, Artificial Sequence
  chemically synthesized
tttcgtaacattttacattt

SEQ ID NO: 66396 - DNA, 20 bp, Artificial Sequence
  chemically synthesized
gtaacattttacatttcaga

SEQ ID NO: 66397 - DNA, 20 bp, Artificial Sequence
  chemically synthesized
acattttacatttcagacgg

SEQ ID NO: 66398 - DNA, 20 bp, Artificial Sequence
  chemically synthesized
tacatttcagacggtggata

SEQ ID NO: 66399 - DNA, 20 bp, Artificial Sequence
  chemically synthesized
agacggtggataaagaactg

SEQ ID NO: 66400 - DNA, 20 bp, Artificial Sequence
  chemically synthesized
acggtggataaagaactgtg

SEQ ID NO: 66401 - DNA, 20 bp, Artificial Sequence
  chemically synthesized
cggtggataaagaactgtgg

SEQ ID NO: 66402 - DNA, 20 bp, Artificial Sequence
  chemically synthesized
ggataaagaactgtggaggc

SEQ ID NO: 66403 - DNA, 20 bp, Artificial Sequence
  chemically synthesized
gataaagaactgtggaggcc

SEQ ID NO: 66404 - DNA, 20 bp, Artificial Sequence
  chemically synthesized
agaactgtggaggccaggcg

SEQ ID NO: 66405 - DNA, 20 bp, Artificial Sequence
  chemically synthesized
actgtggaggccaggcgtgg

SEQ ID NO: 66406 - DNA, 20 bp, Artificial Sequence
  chemically synthesized
gtggctcacacctgtaattc

SEQ ID NO: 66407 - DNA, 20 bp, Artificial Sequence
  chemically synthesized
cacctgtaattcgagcactt

SEQ ID NO: 66408 - DNA, 20 bp, Artificial Sequence
  chemically synthesized
acctgtaattcgagcacttt

SEQ ID NO: 66409 - DNA, 20 bp, Artificial Sequence
  chemically synthesized
ctgtaattcgagcactttgg

SEQ ID NO: 66410 - DNA, 20 bp, Artificial Sequence
  chemically synthesized
tgtaattcgagcactttggg

SEQ ID NO: 66411 - DNA, 20 bp, Artificial Sequence
  chemically synthesized
ttcgagcactttgggaggct

SEQ ID NO: 66412 - DNA, 20 bp, Artificial Sequence
  chemically synthesized
tcgagcactttgggaggctg

SEQ ID NO: 66413 - DNA, 20 bp, Artificial Sequence
  chemically synthesized
agcactttgggaggctgagg

SEQ ID NO: 66414 - DNA, 20 bp, Artificial Sequence
  chemically synthesized
gcactttgggaggctgaggc

SEQ ID NO: 66415 - DNA, 20 bp, Artificial Sequence
  chemically synthesized
actttgggaggctgaggcgg

SEQ ID NO: 66416 - DNA, 20 bp, Artificial Sequence
  chemically synthesized
ctttgggaggctgaggcggg

SEQ ID NO: 66417 - DNA, 20 bp, Artificial Sequence
  chemically synthesized
aggcgggaggatcacctcct

SEQ ID NO: 66418 - DNA, 20 bp, Artificial Sequence
  chemically synthesized
atcacctcctcggatccact

SEQ ID NO: 66419 - DNA, 20 bp, Artificial Sequence
  chemically synthesized
tcacctcctcggatccactg

SEQ ID NO: 66420 - DNA, 20 bp, Artificial Sequence
  chemically synthesized
acctcctcggatccactgag

SEQ ID NO: 66421 - DNA, 20 bp, Artificial Sequence
  chemically synthesized
cctcctcggatccactgagg

SEQ ID NO: 66422 - DNA, 20 bp, Artificial Sequence
  chemically synthesized
ctcggatccactgaggaggt

SEQ ID NO: 66423 - DNA, 20 bp, Artificial Sequence
  chemically synthesized
tcggatccactgaggaggtc

SEQ ID NO: 66424 - DNA, 20 bp, Artificial Sequence
  chemically synthesized
ggatccactgaggaggtcag

SEQ ID NO: 66425 - DNA, 20 bp, Artificial Sequence
  chemically synthesized
ggaggtcaggagtttgcgac

SEQ ID NO: 66426 - DNA, 20 bp, Artificial Sequence
  chemically synthesized
tcaggagtttgcgactagcc

SEQ ID NO: 66427 - DNA, 20 bp, Artificial Sequence
  chemically synthesized
tgcgactagcctggccaacg

SEQ ID NO: 66428 - DNA, 20 bp, Artificial Sequence
  chemically synthesized
tctactaaaaatacaaaaat

SEQ ID NO: 66429 - DNA, 20 bp, Artificial Sequence
  chemically synthesized
ctaaaaatacaaaaattagc

SEQ ID NO: 66430 - DNA, 20 bp, Artificial Sequence
  chemically synthesized
taaaaatacaaaaattagcc

SEQ ID NO: 66431 - DNA, 20 bp, Artificial Sequence
  chemically synthesized
atacaaaaattagccgggcg

SEQ ID NO: 66432 - DNA, 20 bp, Artificial Sequence
  chemically synthesized
caaaaattagccgggcgtgg

SEQ ID NO: 66433 - DNA, 20 bp, Artificial Sequence
  chemically synthesized
aaattagccgggcgtggtgg

SEQ ID NO: 66434 - DNA, 20 bp, Artificial Sequence
  chemically synthesized
aattagccgggcgtggtggc

SEQ ID NO: 66435 - DNA, 20 bp, Artificial Sequence
  chemically synthesized
gtggcaggtacctgtaatcc

SEQ ID NO: 66436 - DNA, 20 bp, Artificial Sequence
  chemically synthesized
tacctgtaatcccagcttct

SEQ ID NO: 66437 - DNA, 20 bp, Artificial Sequence
  chemically synthesized
acctgtaatcccagcttctt

SEQ ID NO: 66438 - DNA, 20 bp, Artificial Sequence
  chemically synthesized
ctgtaatcccagcttcttgg

SEQ ID NO: 66439 - DNA, 20 bp, Artificial Sequence
  chemically synthesized
tgtaatcccagcttcttggg

SEQ ID NO: 66440 - DNA, 20 bp, Artificial Sequence
  chemically synthesized
tcccagcttcttgggaggct

SEQ ID NO: 66441 - DNA, 20 bp, Artificial Sequence
  chemically synthesized
cccagcttcttgggaggctg

SEQ ID NO: 66442 - DNA, 20 bp, Artificial Sequence
  chemically synthesized
agcttcttgggaggctgagg

SEQ ID NO: 66443 - DNA, 20 bp, Artificial Sequence
  chemically synthesized
gcttcttgggaggctgaggc

SEQ ID NO: 66444 - DNA, 20 bp, Artificial Sequence
  chemically synthesized
ttcttgggaggctgaggcag

SEQ ID NO: 66445 - DNA, 20 bp, Artificial Sequence
  chemically synthesized
gcaggagaaccacttgaacc

SEQ ID NO: 66446 - DNA, 20 bp, Artificial Sequence
  chemically synthesized
caggagaaccacttgaaccc

SEQ ID NO: 66447 - DNA, 20 bp, Artificial Sequence
  chemically synthesized
ggagaaccacttgaacccgg

SEQ ID NO: 66448 - DNA, 20 bp, Artificial Sequence
  chemically synthesized
aaccacttgaacccgggaga

SEQ ID NO: 66449 - DNA, 20 bp, Artificial Sequence
  chemically synthesized
aacccgggagacagatgttg

SEQ ID NO: 66450 - DNA, 20 bp, Artificial Sequence
  chemically synthesized
cgggagacagatgttgcagt

SEQ ID NO: 66451 - DNA, 20 bp, Artificial Sequence
  chemically synthesized
gacagatgttgcagtgagct

SEQ ID NO: 66452 - DNA, 20 bp, Artificial Sequence
  chemically synthesized
gagactgcaccattgcactc

SEQ ID NO: 66453 - DNA, 20 bp, Artificial Sequence
  chemically synthesized
tgcaccattgcactccagcc

SEQ ID NO: 66454 - DNA, 20 bp, Artificial Sequence
  chemically synthesized
gcaccattgcactccagcct

SEQ ID NO: 66455 - DNA, 20 bp, Artificial Sequence
  chemically synthesized
tgcactccagcctgggcaac

SEQ ID NO: 66456 - DNA, 20 bp, Artificial Sequence
  chemically synthesized
cactccagcctgggcaacaa

SEQ ID NO: 66457 - DNA, 20 bp, Artificial Sequence
  chemically synthesized
aaactccatctcaaaaaaaa

SEQ ID NO: 66458 - DNA, 20 bp, Artificial Sequence
  chemically synthesized
catctcaaaaaaaaaagaaa

SEQ ID NO: 66459 - DNA, 20 bp, Artificial Sequence
  chemically synthesized
aaaaaaaagaaaaagaactg

SEQ ID NO: 66460 - DNA, 20 bp, Artificial Sequence
  chemically synthesized
tgctccttatcttccacctc

SEQ ID NO: 66461 - DNA, 20 bp, Artificial Sequence
  chemically synthesized
tcttccacctctggttttcc

SEQ ID NO: 66462 - DNA, 20 bp, Artificial Sequence
  chemically synthesized
cagctctgtatctttgttca

SEQ ID NO: 66463 - DNA, 20 bp, Artificial Sequence
  chemically synthesized
ttcatggtacctcctaatcc

SEQ ID NO: 66464 - DNA, 20 bp, Artificial Sequence
  chemically synthesized
gaactcctactaatgcttca

SEQ ID NO: 66465 - DNA, 20 bp, Artificial Sequence
  chemically synthesized
taaataaaaattgaatgaat

SEQ ID NO: 66466 - DNA, 20 bp, Artificial Sequence
  chemically synthesized
aaataaaaattgaatgaatt

SEQ ID NO: 66467 - DNA, 20 bp, Artificial Sequence
  chemically synthesized
ataaaaattgaatgaattgg

SEQ ID NO: 66468 - DNA, 20 bp, Artificial Sequence
  chemically synthesized
aaaaattgaatgaattggga

SEQ ID NO: 66469 - DNA, 20 bp, Artificial Sequence
  chemically synthesized
aattgggagagtactctgtg

SEQ ID NO: 66470 - DNA, 20 bp, Artificial Sequence
  chemically synthesized
tgggagagtactctgtgcag

SEQ ID NO: 66471 - DNA, 20 bp, Artificial Sequence
  chemically synthesized
ggagagtactctgtgcagtg

SEQ ID NO: 66472 - DNA, 20 bp, Artificial Sequence
  chemically synthesized
tactctgtgcagtggagtgt

SEQ ID NO: 66473 - DNA, 20 bp, Artificial Sequence
  chemically synthesized
gtgcagtggagtgtcagttc

SEQ ID NO: 66474 - DNA, 20 bp, Artificial Sequence
  chemically synthesized
gagtgtcagttctggaaacc

SEQ ID NO: 66475 - DNA, 20 bp, Artificial Sequence
  chemically synthesized
aaacccagttctaatgcacc

SEQ ID NO: 66476 - DNA, 20 bp, Artificial Sequence
  chemically synthesized
aacccagttctaatgcacct

SEQ ID NO: 66477 - DNA, 20 bp, Artificial Sequence
  chemically synthesized
acccagttctaatgcacctg

SEQ ID NO: 66478 - DNA, 20 bp, Artificial Sequence
  chemically synthesized
ctggggtgacctcctctctc

SEQ ID NO: 66479 - DNA, 20 bp, Artificial Sequence
  chemically synthesized
tggggtgacctcctctctct

SEQ ID NO: 66480 - DNA, 20 bp, Artificial Sequence
  chemically synthesized
gacctcctctctctgggcct

SEQ ID NO: 66481 - DNA, 20 bp, Artificial Sequence
  chemically synthesized
cctcagtttctcatgactaa

SEQ ID NO: 66482 - DNA, 20 bp, Artificial Sequence
  chemically synthesized
gtttctcatgactaaaagaa

SEQ ID NO: 66483 - DNA, 20 bp, Artificial Sequence
  chemically synthesized
tttctcatgactaaaagaaa

SEQ ID NO: 66484 - DNA, 20 bp, Artificial Sequence
  chemically synthesized
catgactaaaagaaaaggat

SEQ ID NO: 66485 - DNA, 20 bp, Artificial Sequence
  chemically synthesized
atgaatgaataaatgaactt

SEQ ID NO: 66486 - DNA, 20 bp, Artificial Sequence
  chemically synthesized
tgaatgaataaatgaacttg

SEQ ID NO: 66487 - DNA, 20 bp, Artificial Sequence
  chemically synthesized
aatgaataaatgaacttgag

SEQ ID NO: 66488 - DNA, 20 bp, Artificial Sequence
  chemically synthesized
atgaataaatgaacttgagg

SEQ ID NO: 66489 - DNA, 20 bp, Artificial Sequence
  chemically synthesized
ctcctgttccaaacttccac

SEQ ID NO: 66490 - DNA, 20 bp, Artificial Sequence
  chemically synthesized
cctgttccaaacttccacca

SEQ ID NO: 66491 - DNA, 20 bp, Artificial Sequence
  chemically synthesized
gttccaaacttccaccagag

SEQ ID NO: 66492 - DNA, 20 bp, Artificial Sequence
  chemically synthesized
accagagaagaaacatcctc

SEQ ID NO: 66493 - DNA, 20 bp, Artificial Sequence
  chemically synthesized
ccagagaagaaacatcctca

SEQ ID NO: 66494 - DNA, 20 bp, Artificial Sequence
  chemically synthesized
cagagaagaaacatcctcaa

SEQ ID NO: 66495 - DNA, 20 bp, Artificial Sequence
  chemically synthesized
aagaaacatcctcaagggct

SEQ ID NO: 66496 - DNA, 20 bp, Artificial Sequence
  chemically synthesized
acatcctcaagggcttggtt

SEQ ID NO: 66497 - DNA, 20 bp, Artificial Sequence
  chemically synthesized
catcctcaagggcttggttc

SEQ ID NO: 66498 - DNA, 20 bp, Artificial Sequence
  chemically synthesized
cctcaagggcttggttcagg

SEQ ID NO: 66499 - DNA, 20 bp, Artificial Sequence
  chemically synthesized
gcttggttcaggtggtcata

SEQ ID NO: 66500 - DNA, 20 bp, Artificial Sequence
  chemically synthesized
gcctctgcttactcacctct

SEQ ID NO: 66501 - DNA, 20 bp, Artificial Sequence
  chemically synthesized
cctctgcttactcacctctc

SEQ ID NO: 66502 - DNA, 20 bp, Artificial Sequence
  chemically synthesized
tgcttactcacctctcagga

SEQ ID NO: 66503 - DNA, 20 bp, Artificial Sequence
  chemically synthesized
gcttactcacctctcaggat

SEQ ID NO: 66504 - DNA, 20 bp, Artificial Sequence
  chemically synthesized
cttactcacctctcaggatg

SEQ ID NO: 66505 - DNA, 20 bp, Artificial Sequence
  chemically synthesized
gatggggtactcactatttc

SEQ ID NO: 66506 - DNA, 20 bp, Artificial Sequence
  chemically synthesized
ggtactcactatttccagaa

SEQ ID NO: 66507 - DNA, 20 bp, Artificial Sequence
  chemically synthesized
tatttccagaacagttgttt

SEQ ID NO: 66508 - DNA, 20 bp, Artificial Sequence
  chemically synthesized
tttccagaacagttgttttg

SEQ ID NO: 66509 - DNA, 20 bp, Artificial Sequence
  chemically synthesized
ccagaacagttgttttggag

SEQ ID NO: 66510 - DNA, 20 bp, Artificial Sequence
  chemically synthesized
gaacagttgttttggagcag

SEQ ID NO: 66511 - DNA, 20 bp, Artificial Sequence
  chemically synthesized
tgaaatgccctttcttatcc

SEQ ID NO: 66512 - DNA, 20 bp, Artificial Sequence
  chemically synthesized
acaaccccacaacatccctc

SEQ ID NO: 66513 - DNA, 20 bp, Artificial Sequence
  chemically synthesized
ccccacaacatccctcgaga

SEQ ID NO: 66514 - DNA, 20 bp, Artificial Sequence
  chemically synthesized
aacatccctcgagaaagtca

SEQ ID NO: 66515 - DNA, 20 bp, Artificial Sequence
  chemically synthesized
acatccctcgagaaagtcaa

SEQ ID NO: 66516 - DNA, 20 bp, Artificial Sequence
  chemically synthesized
cctcgagaaagtcaaaggct

SEQ ID NO: 66517 - DNA, 20 bp, Artificial Sequence
  chemically synthesized
ctcgagaaagtcaaaggctc

SEQ ID NO: 66518 - DNA, 20 bp, Artificial Sequence
  chemically synthesized
tcgagaaagtcaaaggctca

SEQ ID NO: 66519 - DNA, 20 bp, Artificial Sequence
  chemically synthesized
aagtcaaaggctcagggaac

SEQ ID NO: 66520 - DNA, 20 bp, Artificial Sequence
  chemically synthesized
agtcaaaggctcagggaaca

SEQ ID NO: 66521 - DNA, 20 bp, Artificial Sequence
  chemically synthesized
caaaggctcagggaacaagg

SEQ ID NO: 66522 - DNA, 20 bp, Artificial Sequence
  chemically synthesized
aaggctcagggaacaaggaa

SEQ ID NO: 66523 - DNA, 20 bp, Artificial Sequence
  chemically synthesized
aggctcagggaacaaggaag

SEQ ID NO: 66524 - DNA, 20 bp, Artificial Sequence
  chemically synthesized
ggctcagggaacaaggaaga

SEQ ID NO: 66525 - DNA, 20 bp, Artificial Sequence
  chemically synthesized
acaaggaagagggctatact

SEQ ID NO: 66526 - DNA, 20 bp, Artificial Sequence
  chemically synthesized
gaagagggctatactgagct

SEQ ID NO: 66527 - DNA, 20 bp, Artificial Sequence
  chemically synthesized
agggctatactgagctgagt

SEQ ID NO: 66528 - DNA, 20 bp, Artificial Sequence
  chemically synthesized
gggctatactgagctgagta

SEQ ID NO: 66529 - DNA, 20 bp, Artificial Sequence
  chemically synthesized
ggacttgccatcctgccacc

SEQ ID NO: 66530 - DNA, 20 bp, Artificial Sequence
  chemically synthesized
atcctgccacccagcacact

SEQ ID NO: 66531 - DNA, 20 bp, Artificial Sequence
  chemically synthesized
tgccacccagcacactcaga

SEQ ID NO: 66532 - DNA, 20 bp, Artificial Sequence
  chemically synthesized
cacccagcacactcagacag

SEQ ID NO: 66533 - DNA, 20 bp, Artificial Sequence
  chemically synthesized
agcacactcagacagaagcg

SEQ ID NO: 66534 - DNA, 20 bp, Artificial Sequence
  chemically synthesized
gcacactcagacagaagcgt

SEQ ID NO: 66535 - DNA, 20 bp, Artificial Sequence
  chemically synthesized
cactcagacagaagcgtggg

SEQ ID NO: 66536 - DNA, 20 bp, Artificial Sequence
  chemically synthesized
actcagacagaagcgtgggc

SEQ ID NO: 66537 - DNA, 20 bp, Artificial Sequence
  chemically synthesized
cagacagaagcgtgggcagg

SEQ ID NO: 66538 - DNA, 20 bp, Artificial Sequence
  chemically synthesized
aagcgtgggcaggcagctgt

SEQ ID NO: 66539 - DNA, 20 bp, Artificial Sequence
  chemically synthesized
cgtgggcaggcagctgtgag

SEQ ID NO: 66540 - DNA, 20 bp, Artificial Sequence
  chemically synthesized
gggcaggcagctgtgagtgg

SEQ ID NO: 66541 - DNA, 20 bp, Artificial Sequence
  chemically synthesized
cagaattttcccctctgccc

SEQ ID NO: 66542 - DNA, 20 bp, Artificial Sequence
  chemically synthesized
agaattttcccctctgcccc

SEQ ID NO: 66543 - DNA, 20 bp, Artificial Sequence
  chemically synthesized
aattttcccctctgccccag

SEQ ID NO: 66544 - DNA, 20 bp, Artificial Sequence
  chemically synthesized
cccctctgccccaggagctg

SEQ ID NO: 66545 - DNA, 20 bp, Artificial Sequence
  chemically synthesized
ctgccccaggagctgtggtt

SEQ ID NO: 66546 - DNA, 20 bp, Artificial Sequence
  chemically synthesized
gccccaggagctgtggtttg

SEQ ID NO: 66547 - DNA, 20 bp, Artificial Sequence
  chemically synthesized
aggagctgtggtttggagca

SEQ ID NO: 66548 - DNA, 20 bp, Artificial Sequence
  chemically synthesized
agcaaagacaatgtcaccaa

SEQ ID NO: 66549 - DNA, 20 bp, Artificial Sequence
  chemically synthesized
gcaaagacaatgtcaccaac

SEQ ID NO: 66550 - DNA, 20 bp, Artificial Sequence
  chemically synthesized
gtcaccaacaggtcacactg

SEQ ID NO: 66551 - DNA, 20 bp, Artificial Sequence
  chemically synthesized
ccaacaggtcacactgcaga

SEQ ID NO: 66552 - DNA, 20 bp, Artificial Sequence
  chemically synthesized
caacaggtcacactgcagac

SEQ ID NO: 66553 - DNA, 20 bp, Artificial Sequence
  chemically synthesized
aacaggtcacactgcagaca

SEQ ID NO: 66554 - DNA, 20 bp, Artificial Sequence
  chemically synthesized
gcagacagggacaaaactgc

SEQ ID NO: 66555 - DNA, 20 bp, Artificial Sequence
  chemically synthesized
aaaactgcaagtgatccccc

SEQ ID NO: 66556 - DNA, 20 bp, Artificial Sequence
  chemically synthesized
aaactgcaagtgatcccccc

SEQ ID NO: 66557 - DNA, 20 bp, Artificial Sequence
  chemically synthesized
aactgcaagtgatccccccg

SEQ ID NO: 66558 - DNA, 20 bp, Artificial Sequence
  chemically synthesized
ccccccggggcttgcattgt

SEQ ID NO: 66559 - DNA, 20 bp, Artificial Sequence
  chemically synthesized
ttgcattgtaagttcactca

SEQ ID NO: 66560 - DNA, 20 bp, Artificial Sequence
  chemically synthesized
gtaagttcactcatggtcaa

SEQ ID NO: 66561 - DNA, 20 bp, Artificial Sequence
  chemically synthesized
tctccccatctgctgccact

SEQ ID NO: 66562 - DNA, 20 bp, Artificial Sequence
  chemically synthesized
catctgctgccactgagccg

SEQ ID NO: 66563 - DNA, 20 bp, Artificial Sequence
  chemically synthesized
atctgctgccactgagccgt

SEQ ID NO: 66564 - DNA, 20 bp, Artificial Sequence
  chemically synthesized
tctgctgccactgagccgta

SEQ ID NO: 66565 - DNA, 20 bp, Artificial Sequence
  chemically synthesized
cgattgtcacctccctttta

SEQ ID NO: 66566 - DNA, 20 bp, Artificial Sequence
  chemically synthesized
gtcacctcccttttaaagat

SEQ ID NO: 66567 - DNA, 20 bp, Artificial Sequence
  chemically synthesized
tcacctcccttttaaagatt

SEQ ID NO: 66568 - DNA, 20 bp, Artificial Sequence
  chemically synthesized
cccttttaaagattaggcaa

SEQ ID NO: 66569 - DNA, 20 bp, Artificial Sequence
  chemically synthesized
cttttaaagattaggcaatg

SEQ ID NO: 66570 - DNA, 20 bp, Artificial Sequence
  chemically synthesized
ttttaaagattaggcaatgg

SEQ ID NO: 66571 - DNA, 20 bp, Artificial Sequence
  chemically synthesized
agattaggcaatggaggctc

SEQ ID NO: 66572 - DNA, 20 bp, Artificial Sequence
  chemically synthesized
gattaggcaatggaggctca

SEQ ID NO: 66573 - DNA, 20 bp, Artificial Sequence
  chemically synthesized
ggcaatggaggctcaaggat

SEQ ID NO: 66574 - DNA, 20 bp, Artificial Sequence
  chemically synthesized
tcaaggataagtgacttgtc

SEQ ID NO: 66575 - DNA, 20 bp, Artificial Sequence
  chemically synthesized
aagtgacttgtcaagcacca

SEQ ID NO: 66576 - DNA, 20 bp, Artificial Sequence
  chemically synthesized
gacttgtcaagcaccacagc

SEQ ID NO: 66577 - DNA, 20 bp, Artificial Sequence
  chemically synthesized
tgtcaagcaccacagctagt

SEQ ID NO: 66578 - DNA, 20 bp, Artificial Sequence
  chemically synthesized
tcaagcaccacagctagtga

SEQ ID NO: 66579 - DNA, 20 bp, Artificial Sequence
  chemically synthesized
caagcaccacagctagtgag

SEQ ID NO: 66580 - DNA, 20 bp, Artificial Sequence
  chemically synthesized
gcaccacagctagtgagagg

SEQ ID NO: 66581 - DNA, 20 bp, Artificial Sequence
  chemically synthesized
acagctagtgagaggaagcc

SEQ ID NO: 66582 - DNA, 20 bp, Artificial Sequence
  chemically synthesized
tcaaccccacatctgactcc

SEQ ID NO: 66583 - DNA, 20 bp, Artificial Sequence
  chemically synthesized
ccccacatctgactccaagc

SEQ ID NO: 66584 - DNA, 20 bp, Artificial Sequence
  chemically synthesized
cccacatctgactccaagct

SEQ ID NO: 66585 - DNA, 20 bp, Artificial Sequence
  chemically synthesized
ccacatctgactccaagctg

SEQ ID NO: 66586 - DNA, 20 bp, Artificial Sequence
  chemically synthesized
cacatctgactccaagctgg

SEQ ID NO: 66587 - DNA, 20 bp, Artificial Sequence
  chemically synthesized
tgactccaagctgggggaca

SEQ ID NO: 66588 - DNA, 20 bp, Artificial Sequence
  chemically synthesized
agctgggggacacagaacct

SEQ ID NO: 66589 - DNA, 20 bp, Artificial Sequence
  chemically synthesized
ggggacacagaacctcagcc

SEQ ID NO: 66590 - DNA, 20 bp, Artificial Sequence
  chemically synthesized
acagaacctcagccaagtcc

SEQ ID NO: 66591 - DNA, 20 bp, Artificial Sequence
  chemically synthesized
cagaacctcagccaagtcct

SEQ ID NO: 66592 - DNA, 20 bp, Artificial Sequence
  chemically synthesized
acctcagccaagtcctgggc

SEQ ID NO: 66593 - DNA, 20 bp, Artificial Sequence
  chemically synthesized
agtcctgggctggtaatact

SEQ ID NO: 66594 - DNA, 20 bp, Artificial Sequence
  chemically synthesized
gggctggtaatacttagaaa

SEQ ID NO: 66595 - DNA, 20 bp, Artificial Sequence
  chemically synthesized
tggtaatacttagaaaaagc

SEQ ID NO: 66596 - DNA, 20 bp, Artificial Sequence
  chemically synthesized
taatacttagaaaaagctag

SEQ ID NO: 66597 - DNA, 20 bp, Artificial Sequence
  chemically synthesized
aaaagctagtggtctcgccc

SEQ ID NO: 66598 - DNA, 20 bp, Artificial Sequence
  chemically synthesized
aaagctagtggtctcgcccc

SEQ ID NO: 66599 - DNA, 20 bp, Artificial Sequence
  chemically synthesized
gctagtggtctcgccccggg

SEQ ID NO: 66600 - DNA, 20 bp, Artificial Sequence
  chemically synthesized
agtggtctcgccccgggaag

SEQ ID NO: 66601 - DNA, 20 bp, Artificial Sequence
  chemically synthesized
ccccgggaagaagcttccca

SEQ ID NO: 66602 - DNA, 20 bp, Artificial Sequence
  chemically synthesized
gaagaagcttcccacagcct

SEQ ID NO: 66603 - DNA, 20 bp, Artificial Sequence
  chemically synthesized
aagaagcttcccacagcctg

SEQ ID NO: 66604 - DNA, 20 bp, Artificial Sequence
  chemically synthesized
agaagcttcccacagcctga

SEQ ID NO: 66605 - DNA, 20 bp, Artificial Sequence
  chemically synthesized
gcttcccacagcctgagggc

SEQ ID NO: 66606 - DNA, 20 bp, Artificial Sequence
  chemically synthesized
tcccacagcctgagggccag

SEQ ID NO: 66607 - DNA, 20 bp, Artificial Sequence
  chemically synthesized
acagcctgagggccagaagc

SEQ ID NO: 66608 - DNA, 20 bp, Artificial Sequence
  chemically synthesized
gcctgagggccagaagctgg

SEQ ID NO: 66609 - DNA, 20 bp, Artificial Sequence
  chemically synthesized
ctgagggccagaagctggca

SEQ ID NO: 66610 - DNA, 20 bp, Artificial Sequence
  chemically synthesized
cagaagctggcagagttgtt

SEQ ID NO: 66611 - DNA, 20 bp, Artificial Sequence
  chemically synthesized
gagcaaactcgccccgcaca

SEQ ID NO: 66612 - DNA, 20 bp, Artificial Sequence
  chemically synthesized
aaactcgccccgcacacggt

SEQ ID NO: 66613 - DNA, 20 bp, Artificial Sequence
  chemically synthesized
ctcgccccgcacacggtcgg

SEQ ID NO: 66614 - DNA, 20 bp, Artificial Sequence
  chemically synthesized
ccccgcacacggtcggcaga

SEQ ID NO: 66615 - DNA, 20 bp, Artificial Sequence
  chemically synthesized
gcacacggtcggcagacagc

SEQ ID NO: 66616 - DNA, 20 bp, Artificial Sequence
  chemically synthesized
cacacggtcggcagacagcc

SEQ ID NO: 66617 - DNA, 20 bp, Artificial Sequence
  chemically synthesized
acggtcggcagacagccagg

SEQ ID NO: 66618 - DNA, 20 bp, Artificial Sequence
  chemically synthesized
cggtcggcagacagccaggt

SEQ ID NO: 66619 - DNA, 20 bp, Artificial Sequence
  chemically synthesized
ggcagacagccaggtgggct

SEQ ID NO: 66620 - DNA, 20 bp, Artificial Sequence
  chemically synthesized
gcagacagccaggtgggctg

SEQ ID NO: 66621 - DNA, 20 bp, Artificial Sequence
  chemically synthesized
agccaggtgggctgaggcgc

SEQ ID NO: 66622 - DNA, 20 bp, Artificial Sequence
  chemically synthesized
gccaggtgggctgaggcgcc

SEQ ID NO: 66623 - DNA, 20 bp, Artificial Sequence
  chemically synthesized
gtgggctgaggcgccgggct

SEQ ID NO: 66624 - DNA, 20 bp, Artificial Sequence
  chemically synthesized
tgaggcgccgggctcagctc

SEQ ID NO: 66625 - DNA, 20 bp, Artificial Sequence
  chemically synthesized
gaggcgccgggctcagctcc

SEQ ID NO: 66626 - DNA, 20 bp, Artificial Sequence
  chemically synthesized
aggcgccgggctcagctccg

SEQ ID NO: 66627 - DNA, 20 bp, Artificial Sequence
  chemically synthesized
cgggctcagctccggggtcc

SEQ ID NO: 66628 - DNA, 20 bp, Artificial Sequence
  chemically synthesized
cagctccggggtcccagtac

SEQ ID NO: 66629 - DNA, 20 bp, Artificial Sequence
  chemically synthesized
agctccggggtcccagtacc

SEQ ID NO: 66630 - DNA, 20 bp, Artificial Sequence
  chemically synthesized
agtaccaggcgcaccacctc

SEQ ID NO: 66631 - DNA, 20 bp, Artificial Sequence
  chemically synthesized
aggcgcaccacctccggctc

SEQ ID NO: 66632 - DNA, 20 bp, Artificial Sequence
  chemically synthesized
gcgcaccacctccggctcca

SEQ ID NO: 66633 - DNA, 20 bp, Artificial Sequence
  chemically synthesized
acctccggctccagagcacc

SEQ ID NO: 66634 - DNA, 20 bp, Artificial Sequence
  chemically synthesized
cctccggctccagagcacca

SEQ ID NO: 66635 - DNA, 20 bp, Artificial Sequence
  chemically synthesized
ctccggctccagagcaccaa

SEQ ID NO: 66636 - DNA, 20 bp, Artificial Sequence
  chemically synthesized
ccaagggcccttccctgcct

SEQ ID NO: 66637 - DNA, 20 bp, Artificial Sequence
  chemically synthesized
ccttccctgcctgagtccta

SEQ ID NO: 66638 - DNA, 20 bp, Artificial Sequence
  chemically synthesized
cttccctgcctgagtcctaa

SEQ ID NO: 66639 - DNA, 20 bp, Artificial Sequence
  chemically synthesized
tgagtcctaaaggacgccaa

SEQ ID NO: 66640 - DNA, 20 bp, Artificial Sequence
  chemically synthesized
gagtcctaaaggacgccaat

SEQ ID NO: 66641 - DNA, 20 bp, Artificial Sequence
  chemically synthesized
aaaggacgccaatgggcctc

SEQ ID NO: 66642 - DNA, 20 bp, Artificial Sequence
  chemically synthesized
ccccttctcccctgcccctt

SEQ ID NO: 66643 - DNA, 20 bp, Artificial Sequence
  chemically synthesized
ttctcccctgccccttcagc

SEQ ID NO: 66644 - DNA, 20 bp, Artificial Sequence
  chemically synthesized
cttcagctggttcttttctt

SEQ ID NO: 66645 - DNA, 20 bp, Artificial Sequence
  chemically synthesized
gttcttttcttcggctgaaa

SEQ ID NO: 66646 - DNA, 20 bp, Artificial Sequence
  chemically synthesized
ttttcttcggctgaaacaga

SEQ ID NO: 66647 - DNA, 20 bp, Artificial Sequence
  chemically synthesized
ggctgaaacagatggaatac

SEQ ID NO: 66648 - DNA, 20 bp, Artificial Sequence
  chemically synthesized
ctgaaacagatggaatacta

SEQ ID NO: 66649 - DNA, 20 bp, Artificial Sequence
  chemically synthesized
cagatggaatactagagcat

SEQ ID NO: 66650 - DNA, 20 bp, Artificial Sequence
  chemically synthesized
agcatgagttctgtgtcata

SEQ ID NO: 66651 - DNA, 20 bp, Artificial Sequence
  chemically synthesized
aagaaattgcctcgtgctcc

SEQ ID NO: 66652 - DNA, 20 bp, Artificial Sequence
  chemically synthesized
ttcccaccccgcccctgtct

SEQ ID NO: 66653 - DNA, 20 bp, Artificial Sequence
  chemically synthesized
tcccaccccgcccctgtctc

SEQ ID NO: 66654 - DNA, 20 bp, Artificial Sequence
  chemically synthesized
caccccgcccctgtctcggg

SEQ ID NO: 66655 - DNA, 20 bp, Artificial Sequence
  chemically synthesized
accccgcccctgtctcgggt

SEQ ID NO: 66656 - DNA, 20 bp, Artificial Sequence
  chemically synthesized
ccccgcccctgtctcgggta

SEQ ID NO: 66657 - DNA, 20 bp, Artificial Sequence
  chemically synthesized
ctcgggtagggccttctctc

SEQ ID NO: 66658 - DNA, 20 bp, Artificial Sequence
  chemically synthesized
tcgggtagggccttctctcc

SEQ ID NO: 66659 - DNA, 20 bp, Artificial Sequence
  chemically synthesized
ccatgttttccaaaccaaat

SEQ ID NO: 66660 - DNA, 20 bp, Artificial Sequence
  chemically synthesized
caaatcggaacccactataa

SEQ ID NO: 66661 - DNA, 20 bp, Artificial Sequence
  chemically synthesized
tcggaacccactataatggc

SEQ ID NO: 66662 - DNA, 20 bp, Artificial Sequence
  chemically synthesized
aagcccgctttctctgtgcc

SEQ ID NO: 66663 - DNA, 20 bp, Artificial Sequence
  chemically synthesized
cgctttctctgtgcctggtg

SEQ ID NO: 66664 - DNA, 20 bp, Artificial Sequence
  chemically synthesized
tctgtgcctggtgcagttcc

SEQ ID NO: 66665 - DNA, 20 bp, Artificial Sequence
  chemically synthesized
gtgcagttcccagtacgttc

SEQ ID NO: 66666 - DNA, 20 bp, Artificial Sequence
  chemically synthesized
tgcagttcccagtacgttcc

SEQ ID NO: 66667 - DNA, 20 bp, Artificial Sequence
  chemically synthesized
tccttcacccacctgtgccg

SEQ ID NO: 66668 - DNA, 20 bp, Artificial Sequence
  chemically synthesized
tcacccacctgtgccgcggc

SEQ ID NO: 66669 - DNA, 20 bp, Artificial Sequence
  chemically synthesized
cacccacctgtgccgcggcg

SEQ ID NO: 66670 - DNA, 20 bp, Artificial Sequence
  chemically synthesized
ccacctgtgccgcggcgagg

SEQ ID NO: 66671 - DNA, 20 bp, Artificial Sequence
  chemically synthesized
tgccgcggcgaggcagaaac

SEQ ID NO: 66672 - DNA, 20 bp, Artificial Sequence
  chemically synthesized
gccgcggcgaggcagaaact

SEQ ID NO: 66673 - DNA, 20 bp, Artificial Sequence
  chemically synthesized
gaggcagaaactgggaaatc

SEQ ID NO: 66674 - DNA, 20 bp, Artificial Sequence
  chemically synthesized
aggcagaaactgggaaatct

SEQ ID NO: 66675 - DNA, 20 bp, Artificial Sequence
  chemically synthesized
cagaaactgggaaatctggg

SEQ ID NO: 66676 - DNA, 20 bp, Artificial Sequence
  chemically synthesized
agaaactgggaaatctgggc

SEQ ID NO: 66677 - DNA, 20 bp, Artificial Sequence
  chemically synthesized
gaaatctgggcaggatatcc

SEQ ID NO: 66678 - DNA, 20 bp, Artificial Sequence
  chemically synthesized
atctgggcaggatatcctgg

SEQ ID NO: 66679 - DNA, 20 bp, Artificial Sequence
  chemically synthesized
gtgctctgctcgcccttcct

SEQ ID NO: 66680 - DNA, 20 bp, Artificial Sequence
  chemically synthesized
gctcgcccttcctcggcctc

SEQ ID NO: 66681 - DNA, 20 bp, Artificial Sequence
  chemically synthesized
ctcgcccttcctcggcctcc

SEQ ID NO: 66682 - DNA, 20 bp, Artificial Sequence
  chemically synthesized
ccgcgaaccttcccactgaa

SEQ ID NO: 66683 - DNA, 20 bp, Artificial Sequence
  chemically synthesized
aaccttcccactgaatagcg

SEQ ID NO: 66684 - DNA, 20 bp, Artificial Sequence
  chemically synthesized
aatagcgcagccgcacgccc

SEQ ID NO: 66685 - DNA, 20 bp, Artificial Sequence
  chemically synthesized
gcgcagccgcacgccccagc

SEQ ID NO: 66686 - DNA, 20 bp, Artificial Sequence
  chemically synthesized
cacgccccagcaagtcccca

SEQ ID NO: 66687 - DNA, 20 bp, Artificial Sequence
  chemically synthesized
cgccccagcaagtccccaaa

SEQ ID NO: 66688 - DNA, 20 bp, Artificial Sequence
  chemically synthesized
ccagcaagtccccaaagagc

SEQ ID NO: 66689 - DNA, 20 bp, Artificial Sequence
  chemically synthesized
ctcccccgccgccttgcctg

SEQ ID NO: 66690 - DNA, 20 bp, Artificial Sequence
  chemically synthesized
ccgccttgcctgcagtcccc

SEQ ID NO: 66691 - DNA, 20 bp, Artificial Sequence
  chemically synthesized
gcagtccccaagatcgtgcc

SEQ ID NO: 66692 - DNA, 20 bp, Artificial Sequence
  chemically synthesized
ccccaagatcgtgccaagcg

SEQ ID NO: 66693 - DNA, 20 bp, Artificial Sequence
  chemically synthesized
ccaagatcgtgccaagcgaa

SEQ ID NO: 66694 - DNA, 20 bp, Artificial Sequence
  chemically synthesized
cgtgccaagcgaagagccct

SEQ ID NO: 66695 - DNA, 20 bp, Artificial Sequence
  chemically synthesized
actccacttcctctcttaca

SEQ ID NO: 66696 - DNA, 20 bp, Artificial Sequence
  chemically synthesized
ctccacttcctctcttacat

SEQ ID NO: 66697 - DNA, 20 bp, Artificial Sequence
  chemically synthesized
tccacttcctctcttacatg

SEQ ID NO: 66698 - DNA, 20 bp, Artificial Sequence
  chemically synthesized
ccacttcctctcttacatgg

SEQ ID NO: 66699 - DNA, 20 bp, Artificial Sequence
  chemically synthesized
cacttcctctcttacatggg

SEQ ID NO: 66700 - DNA, 20 bp, Artificial Sequence
  chemically synthesized
ctcttacatggggggaaact

SEQ ID NO: 66701 - DNA, 20 bp, Artificial Sequence
  chemically synthesized
tcttacatggggggaaactg

SEQ ID NO: 66702 - DNA, 20 bp, Artificial Sequence
  chemically synthesized
atggggggaaactgaggccc

SEQ ID NO: 66703 - DNA, 20 bp, Artificial Sequence
  chemically synthesized
ggggggaaactgaggcccga

SEQ ID NO: 66704 - DNA, 20 bp, Artificial Sequence
  chemically synthesized
gggggaaactgaggcccgag

SEQ ID NO: 66705 - DNA, 20 bp, Artificial Sequence
  chemically synthesized
aactgaggcccgagaggaaa

SEQ ID NO: 66706 - DNA, 20 bp, Artificial Sequence
  chemically synthesized
gaaacagcaccgcaccgtcc

SEQ ID NO: 66707 - DNA, 20 bp, Artificial Sequence
  chemically synthesized
gcaccgcaccgtcccggctg

SEQ ID NO: 66708 - DNA, 20 bp, Artificial Sequence
  chemically synthesized
caccgcaccgtcccggctgc

SEQ ID NO: 66709 - DNA, 20 bp, Artificial Sequence
  chemically synthesized
tcccggctgcgggttcgccc

SEQ ID NO: 66710 - DNA, 20 bp, Artificial Sequence
  chemically synthesized
ccatccctacacccgcacct

SEQ ID NO: 66711 - DNA, 20 bp, Artificial Sequence
  chemically synthesized
cctacacccgcaccttggcg

SEQ ID NO: 66712 - DNA, 20 bp, Artificial Sequence
  chemically synthesized
acacccgcaccttggcgcag

SEQ ID NO: 66713 - DNA, 20 bp, Artificial Sequence
  chemically synthesized
cccgcaccttggcgcagcgg

SEQ ID NO: 66714 - DNA, 20 bp, Artificial Sequence
  chemically synthesized
gcaccttggcgcagcggtgg

SEQ ID NO: 66715 - DNA, 20 bp, Artificial Sequence
  chemically synthesized
caccttggcgcagcggtgga

SEQ ID NO: 66716 - DNA, 20 bp, Artificial Sequence
  chemically synthesized
cttggcgcagcggtggaagg

SEQ ID NO: 66717 - DNA, 20 bp, Artificial Sequence
  chemically synthesized
gcagcggtggaaggtggctg

SEQ ID NO: 66718 - DNA, 20 bp, Artificial Sequence
  chemically synthesized
ggtggctgtggttccgtgct

SEQ ID NO: 66719 - DNA, 20 bp, Artificial Sequence
  chemically synthesized
gtggctgtggttccgtgctc

SEQ ID NO: 66720 - DNA, 20 bp, Artificial Sequence
  chemically synthesized
ggttccgtgctcgggtgctt

SEQ ID NO: 66721 - DNA, 20 bp, Artificial Sequence
  chemically synthesized
ccgtgctcgggtgcttcggc

SEQ ID NO: 66722 - DNA, 20 bp, Artificial Sequence
  chemically synthesized
cgtgctcgggtgcttcggcc

SEQ ID NO: 66723 - DNA, 20 bp, Artificial Sequence
  chemically synthesized
ttcggccaggccgtcctcct

SEQ ID NO: 66724 - DNA, 20 bp, Artificial Sequence
  chemically synthesized
ggccgtcctcctcggaacgc

SEQ ID NO: 66725 - DNA, 20 bp, Artificial Sequence
  chemically synthesized
gccgtcctcctcggaacgca

SEQ ID NO: 66726 - DNA, 20 bp, Artificial Sequence
  chemically synthesized
tcctcctcggaacgcaaggc

SEQ ID NO: 66727 - DNA, 20 bp, Artificial Sequence
  chemically synthesized
tcggaacgcaaggctagcac

SEQ ID NO: 66728 - DNA, 20 bp, Artificial Sequence
  chemically synthesized
aggctagcaccagctcctcg

SEQ ID NO: 66729 - DNA, 20 bp, Artificial Sequence
  chemically synthesized
cgtcctcgtcctcctgcgca

SEQ ID NO: 66730 - DNA, 20 bp, Artificial Sequence
  chemically synthesized
gtcctcgtcctcctgcgcac

SEQ ID NO: 66731 - DNA, 20 bp, Artificial Sequence
  chemically synthesized
ctcctgcgcacgggcgcccg

SEQ ID NO: 66732 - DNA, 20 bp, Artificial Sequence
  chemically synthesized
tcctgcgcacgggcgcccgc

SEQ ID NO: 66733 - DNA, 20 bp, Artificial Sequence
  chemically synthesized
gcacgggcgcccgcgggacc

SEQ ID NO: 66734 - DNA, 20 bp, Artificial Sequence
  chemically synthesized
cacgggcgcccgcgggaccc

SEQ ID NO: 66735 - DNA, 20 bp, Artificial Sequence
  chemically synthesized
cgggcgcccgcgggacccag

SEQ ID NO: 66736 - DNA, 20 bp, Artificial Sequence
  chemically synthesized
gcgcccgcgggacccaggag

SEQ ID NO: 66737 - DNA, 20 bp, Artificial Sequence
  chemically synthesized
cccgcgggacccaggagcag

SEQ ID NO: 66738 - DNA, 20 bp, Artificial Sequence
  chemically synthesized
gcgggacccaggagcagcag

SEQ ID NO: 66739 - DNA, 20 bp, Artificial Sequence
  chemically synthesized
ggacccaggagcagcagcag

SEQ ID NO: 66740 - DNA, 20 bp, Artificial Sequence
  chemically synthesized
cccaggagcagcagcagcag

SEQ ID NO: 66741 - DNA, 20 bp, Artificial Sequence
  chemically synthesized
aggagcagcagcagcagcag

SEQ ID NO: 66742 - DNA, 20 bp, Artificial Sequence
  chemically synthesized
agcagcagcagcagcagcag

SEQ ID NO: 66743 - DNA, 20 bp, Artificial Sequence
  chemically synthesized
agcagcagcagcagcagcag

SEQ ID NO: 66744 - DNA, 20 bp, Artificial Sequence
  chemically synthesized
agcagcagcagcagcagtgg

SEQ ID NO: 66745 - DNA, 20 bp, Artificial Sequence
  chemically synthesized
agcagcagcagcagtggcag

SEQ ID NO: 66746 - DNA, 20 bp, Artificial Sequence
  chemically synthesized
gcagcagtggcagcggccac

SEQ ID NO: 66747 - DNA, 20 bp, Artificial Sequence
  chemically synthesized
cagcagtggcagcggccacc

SEQ ID NO: 66748 - DNA, 20 bp, Artificial Sequence
  chemically synthesized
cagcggccaccaggaccgcc

SEQ ID NO: 66749 - DNA, 20 bp, Artificial Sequence
  chemically synthesized
gcggccaccaggaccgcctg

SEQ ID NO: 66750 - DNA, 20 bp, Artificial Sequence
  chemically synthesized
ccaggaccgcctggagctga

SEQ ID NO: 66751 - DNA, 20 bp, Artificial Sequence
  chemically synthesized
ctggagctgacggtgcccat

SEQ ID NO: 66752 - DNA, 20 bp, Artificial Sequence
  chemically synthesized
tggagctgacggtgcccatg

SEQ ID NO: 66753 - DNA, 20 bp, Artificial Sequence
  chemically synthesized
ggagctgacggtgcccatga

SEQ ID NO: 66754 - DNA, 20 bp, Artificial Sequence
  chemically synthesized
ctgacggtgcccatgagggc

SEQ ID NO: 66755 - DNA, 20 bp, Artificial Sequence
  chemically synthesized
tgacggtgcccatgagggcc

SEQ ID NO: 66756 - DNA, 20 bp, Artificial Sequence
  chemically synthesized
gacggtgcccatgagggcca

SEQ ID NO: 66757 - DNA, 20 bp, Artificial Sequence
  chemically synthesized
acggtgcccatgagggccag

SEQ ID NO: 66758 - DNA, 20 bp, Artificial Sequence
  chemically synthesized
ggtgcccatgagggccaggg

SEQ ID NO: 66759 - DNA, 20 bp, Artificial Sequence
  chemically synthesized
tgcccatgagggccagggga

SEQ ID NO: 66760 - DNA, 20 bp, Artificial Sequence
  chemically synthesized
gcccatgagggccaggggag

SEQ ID NO: 66761 - DNA, 20 bp, Artificial Sequence
  chemically synthesized
caggggagaggttgctgtcc

SEQ ID NO: 66762 - DNA, 20 bp, Artificial Sequence
  chemically synthesized
ggagaggttgctgtcctggc

SEQ ID NO: 66763 - DNA, 20 bp, Artificial Sequence
  chemically synthesized
gagaggttgctgtcctggcg

SEQ ID NO: 66764 - DNA, 20 bp, Artificial Sequence
  chemically synthesized
gaggttgctgtcctggcgag

SEQ ID NO: 66765 - DNA, 20 bp, Artificial Sequence
  chemically synthesized
gctgtcctggcgaggagacc

SEQ ID NO: 66766 - DNA, 20 bp, Artificial Sequence
  chemically synthesized
tgtcctggcgaggagaccta

SEQ ID NO: 66767 - DNA, 20 bp, Artificial Sequence
  chemically synthesized
gtcctggcgaggagacctag

SEQ ID NO: 66768 - DNA, 20 bp, Artificial Sequence
  chemically synthesized
ggagacctagaggccgtgcg

SEQ ID NO: 66769 - DNA, 20 bp, Artificial Sequence
  chemically synthesized
aggccgtgcgcggtccacgc

SEQ ID NO: 66770 - DNA, 20 bp, Artificial Sequence
  chemically synthesized
ccgtgcgcggtccacgccgg

SEQ ID NO: 66771 - DNA, 20 bp, Artificial Sequence
  chemically synthesized
gtccacgccggcggcgcctt

SEQ ID NO: 66772 - DNA, 20 bp, Artificial Sequence
  chemically synthesized
cggcggcgccttgagccttg

SEQ ID NO: 66773 - DNA, 20 bp, Artificial Sequence
  chemically synthesized
cggcgccttgagccttgcgg

SEQ ID NO: 66774 - DNA, 20 bp, Artificial Sequence
  chemically synthesized
ggcgccttgagccttgcggt

SEQ ID NO: 66775 - DNA, 20 bp, Artificial Sequence
  chemically synthesized
gcgccttgagccttgcggtg

SEQ ID NO: 66776 - DNA, 20 bp, Artificial Sequence
  chemically synthesized
gccttgagccttgcggtggg

SEQ ID NO: 66777 - DNA, 20 bp, Artificial Sequence
  chemically synthesized
ccttgagccttgcggtgggg

SEQ ID NO: 66778 - DNA, 20 bp, Artificial Sequence
  chemically synthesized
ttgcggtggggaggactgtg

SEQ ID NO: 66779 - DNA, 20 bp, Artificial Sequence
  chemically synthesized
tgcggtggggaggactgtgc

SEQ ID NO: 66780 - DNA, 20 bp, Artificial Sequence
  chemically synthesized
cggtggggaggactgtgcag

SEQ ID NO: 66781 - DNA, 20 bp, Artificial Sequence
  chemically synthesized
ggaggactgtgcaggagctg

SEQ ID NO: 66782 - DNA, 20 bp, Artificial Sequence
  chemically synthesized
actgtgcaggagctgaagtt

SEQ ID NO: 66783 - DNA, 20 bp, Artificial Sequence
  chemically synthesized
ctgtgcaggagctgaagttc

SEQ ID NO: 66784 - DNA, 20 bp, Artificial Sequence
  chemically synthesized
gtgcaggagctgaagttcag

SEQ ID NO: 66785 - DNA, 20 bp, Artificial Sequence
  chemically synthesized
caggagctgaagttcaggag

SEQ ID NO: 66786 - DNA, 20 bp, Artificial Sequence
  chemically synthesized
aggagctgaagttcaggagc

SEQ ID NO: 66787 - DNA, 20 bp, Artificial Sequence
  chemically synthesized
ggagctgaagttcaggagca

SEQ ID NO: 66788 - DNA, 20 bp, Artificial Sequence
  chemically synthesized
gttcaggagcagggcgcgtg

SEQ ID NO: 66789 - DNA, 20 bp, Artificial Sequence
  chemically synthesized
ttcaggagcagggcgcgtga

SEQ ID NO: 66790 - DNA, 20 bp, Artificial Sequence
  chemically synthesized
tcaggagcagggcgcgtgaa

SEQ ID NO: 66791 - DNA, 20 bp, Artificial Sequence
  chemically synthesized
caggagcagggcgcgtgaag

SEQ ID NO: 66792 - DNA, 20 bp, Artificial Sequence
  chemically synthesized
agggcgcgtgaaggggcgcg

SEQ ID NO: 66793 - DNA, 20 bp, Artificial Sequence
  chemically synthesized
tgaaggggcgcgcggaatcc

SEQ ID NO: 66794 - DNA, 20 bp, Artificial Sequence
  chemically synthesized
ggggcgcgcggaatcctggc

SEQ ID NO: 66795 - DNA, 20 bp, Artificial Sequence
  chemically synthesized
gggcgcgcggaatcctggct

SEQ ID NO: 66796 - DNA, 20 bp, Artificial Sequence
  chemically synthesized
gcgcgcggaatcctggctgg

SEQ ID NO: 66797 - DNA, 20 bp, Artificial Sequence
  chemically synthesized
gcggaatcctggctgggagc

SEQ ID NO: 66798 - DNA, 20 bp, Artificial Sequence
  chemically synthesized
cggaatcctggctgggagct

SEQ ID NO: 66799 - DNA, 20 bp, Artificial Sequence
  chemically synthesized
gaatcctggctgggagctgg

SEQ ID NO: 66800 - DNA, 20 bp, Artificial Sequence
  chemically synthesized
gctgctgcaacgacgcgtcc

SEQ ID NO: 66801 - DNA, 20 bp, Artificial Sequence
  chemically synthesized
cgacgcgtcccggcccgccc

SEQ ID NO: 66802 - DNA, 20 bp, Artificial Sequence
  chemically synthesized
gcgtcccggcccgcccgagc

SEQ ID NO: 66803 - DNA, 20 bp, Artificial Sequence
  chemically synthesized
cccgagccagtctcactgcc

SEQ ID NO: 66804 - DNA, 20 bp, Artificial Sequence
  chemically synthesized
cactgcctggctcactcctc

SEQ ID NO: 66805 - DNA, 20 bp, Artificial Sequence
  chemically synthesized
actgcctggctcactcctcc

SEQ ID NO: 66806 - DNA, 20 bp, Artificial Sequence
  chemically synthesized
ctggctcactcctccaggct

SEQ ID NO: 66807 - DNA, 20 bp, Artificial Sequence
  chemically synthesized
ggctcagaccctgaactgaa

SEQ ID NO: 66808 - DNA, 20 bp, Artificial Sequence
  chemically synthesized
tcagaccctgaactgaacgg

SEQ ID NO: 66809 - DNA, 20 bp, Artificial Sequence
  chemically synthesized
cggcgcccgcctgcaaccat

SEQ ID NO: 66810 - DNA, 20 bp, Artificial Sequence
  chemically synthesized
tgagcgcctcgacgtcgctg

SEQ ID NO: 66811 - DNA, 20 bp, Artificial Sequence
  chemically synthesized
acgtcgctgcggaaaccttc

SEQ ID NO: 66812 - DNA, 20 bp, Artificial Sequence
  chemically synthesized
cgtcgctgcggaaaccttct

SEQ ID NO: 66813 - DNA, 20 bp, Artificial Sequence
  chemically synthesized
gtcgctgcggaaaccttcta

SEQ ID NO: 66814 - DNA, 20 bp, Artificial Sequence
  chemically synthesized
tgcggaaaccttctagggtg

SEQ ID NO: 66815 - DNA, 20 bp, Artificial Sequence
  chemically synthesized
gcggaaaccttctagggtgt

SEQ ID NO: 66816 - DNA, 20 bp, Artificial Sequence
  chemically synthesized
gggtgtgggtgcttgacgcc

SEQ ID NO: 66817 - DNA, 20 bp, Artificial Sequence
  chemically synthesized
ggtgtgggtgcttgacgcct

SEQ ID NO: 66818 - DNA, 20 bp, Artificial Sequence
  chemically synthesized
gtgtgggtgcttgacgcctg

SEQ ID NO: 66819 - DNA, 20 bp, Artificial Sequence
  chemically synthesized
tgcttgacgcctggggcgcg

SEQ ID NO: 66820 - DNA, 20 bp, Artificial Sequence
  chemically synthesized
gggcgcgcagatcacgccac

SEQ ID NO: 66821 - DNA, 20 bp, Artificial Sequence
  chemically synthesized
gcgcgcagatcacgccacca

SEQ ID NO: 66822 - DNA, 20 bp, Artificial Sequence
  chemically synthesized
tcacgccaccagagccccat

SEQ ID NO: 66823 - DNA, 20 bp, Artificial Sequence
  chemically synthesized
cctatctgattaaacattaa

SEQ ID NO: 66824 - DNA, 20 bp, Artificial Sequence
  chemically synthesized
ttaaacattaacggaacccc

SEQ ID NO: 66825 - DNA, 20 bp, Artificial Sequence
  chemically synthesized
cattaacggaacccccggac

SEQ ID NO: 66826 - DNA, 20 bp, Artificial Sequence
  chemically synthesized
ttaacggaacccccggactg

SEQ ID NO: 66827 - DNA, 20 bp, Artificial Sequence
  chemically synthesized
taacggaacccccggactgg

SEQ ID NO: 66828 - DNA, 20 bp, Artificial Sequence
  chemically synthesized
gaacccccggactggaggat

SEQ ID NO: 66829 - DNA, 20 bp, Artificial Sequence
  chemically synthesized
aacccccggactggaggatc

SEQ ID NO: 66830 - DNA, 20 bp, Artificial Sequence
  chemically synthesized
cggactggaggatcaggttt

SEQ ID NO: 66831 - DNA, 20 bp, Artificial Sequence
  chemically synthesized
tcggcctcgccctccccaaa

SEQ ID NO: 66832 - DNA, 20 bp, Artificial Sequence
  chemically synthesized
tcgccctccccaaacagcgt

SEQ ID NO: 66833 - DNA, 20 bp, Artificial Sequence
  chemically synthesized
aaacagcgtcagattacgcg

SEQ ID NO: 66834 - DNA, 20 bp, Artificial Sequence
  chemically synthesized
acagcgtcagattacgcgca

SEQ ID NO: 66835 - DNA, 20 bp, Artificial Sequence
  chemically synthesized
cagcgtcagattacgcgcag

SEQ ID NO: 66836 - DNA, 20 bp, Artificial Sequence
  chemically synthesized
agcgtcagattacgcgcaga

SEQ ID NO: 66837 - DNA, 20 bp, Artificial Sequence
  chemically synthesized
gtcagattacgcgcagaggg

SEQ ID NO: 66838 - DNA, 20 bp, Artificial Sequence
  chemically synthesized
aaaaactcccaaatcctaac

SEQ ID NO: 66839 - DNA, 20 bp, Artificial Sequence
  chemically synthesized
aaaactcccaaatcctaact

SEQ ID NO: 66840 - DNA, 20 bp, Artificial Sequence
  chemically synthesized
ctcccaaatcctaactgggc

SEQ ID NO: 66841 - DNA, 20 bp, Artificial Sequence
  chemically synthesized
ccaaatcctaactgggctgg

SEQ ID NO: 66842 - DNA, 20 bp, Artificial Sequence
  chemically synthesized
caaatcctaactgggctgga

SEQ ID NO: 66843 - DNA, 20 bp, Artificial Sequence
  chemically synthesized
atcctaactgggctggaagg

SEQ ID NO: 66844 - DNA, 20 bp, Artificial Sequence
  chemically synthesized
tcctaactgggctggaaggc

SEQ ID NO: 66845 - DNA, 20 bp, Artificial Sequence
  chemically synthesized
aactgggctggaaggcaggc

SEQ ID NO: 66846 - DNA, 20 bp, Artificial Sequence
  chemically synthesized
tggaaggcaggccggcgccc

SEQ ID NO: 66847 - DNA, 20 bp, Artificial Sequence
  chemically synthesized
ggaaggcaggccggcgccct

SEQ ID NO: 66848 - DNA, 20 bp, Artificial Sequence
  chemically synthesized
gaaggcaggccggcgcccta

SEQ ID NO: 66849 - DNA, 20 bp, Artificial Sequence
  chemically synthesized
aaggcaggccggcgccctag

SEQ ID NO: 66850 - DNA, 20 bp, Artificial Sequence
  chemically synthesized
ctcccgcctctcaccctgcg

SEQ ID NO: 66851 - DNA, 20 bp, Artificial Sequence
  chemically synthesized
tcccgcctctcaccctgcgt

SEQ ID NO: 66852 - DNA, 20 bp, Artificial Sequence
  chemically synthesized
tctcaccctgcgtgggatgc

SEQ ID NO: 66853 - DNA, 20 bp, Artificial Sequence
  chemically synthesized
tgcgtgggatgccagactcc

SEQ ID NO: 66854 - DNA, 20 bp, Artificial Sequence
  chemically synthesized
tgccagactccaagttctgc

SEQ ID NO: 66855 - DNA, 20 bp, Artificial Sequence
  chemically synthesized
gccagactccaagttctgcc

SEQ ID NO: 66856 - DNA, 20 bp, Artificial Sequence
  chemically synthesized
ttctgccgggcccacctttt

SEQ ID NO: 66857 - DNA, 20 bp, Artificial Sequence
  chemically synthesized
cccaccttttcagtgtttcc

SEQ ID NO: 66858 - DNA, 20 bp, Artificial Sequence
  chemically synthesized
ccaccttttcagtgtttcct

SEQ ID NO: 66859 - DNA, 20 bp, Artificial Sequence
  chemically synthesized
ccaccttgtctcctgctgac

SEQ ID NO: 66860 - DNA, 20 bp, Artificial Sequence
  chemically synthesized
cttgtctcctgctgaccagt

SEQ ID NO: 66861 - DNA, 20 bp, Artificial Sequence
  chemically synthesized
cttctgaatcaatcctactg

SEQ ID NO: 66862 - DNA, 20 bp, Artificial Sequence
  chemically synthesized
gcccaccgaattctttccac

SEQ ID NO: 66863 - DNA, 20 bp, Artificial Sequence
  chemically synthesized
tctttccactggccttaacc

SEQ ID NO: 66864 - DNA, 20 bp, Artificial Sequence
  chemically synthesized
ttccactggccttaacctgg

SEQ ID NO: 66865 - DNA, 20 bp, Artificial Sequence
  chemically synthesized
acctggcagccttctaaact

SEQ ID NO: 66866 - DNA, 20 bp, Artificial Sequence
  chemically synthesized
gcagccttctaaacttagcc

SEQ ID NO: 66867 - DNA, 20 bp, Artificial Sequence
  chemically synthesized
aacttagcctggaccccctc

SEQ ID NO: 66868 - DNA, 20 bp, Artificial Sequence
  chemically synthesized
tgcacactgaccttaccaac

SEQ ID NO: 66869 - DNA, 20 bp, Artificial Sequence
  chemically synthesized
taccaactagctgctccttg

SEQ ID NO: 66870 - DNA, 20 bp, Artificial Sequence
  chemically synthesized
ccaactagctgctccttgaa

SEQ ID NO: 66871 - DNA, 20 bp, Artificial Sequence
  chemically synthesized
gattgcttgcttttgatgtc

SEQ ID NO: 66872 - DNA, 20 bp, Artificial Sequence
  chemically synthesized
gtccagcctacatgcatttc

SEQ ID NO: 66873 - DNA, 20 bp, Artificial Sequence
  chemically synthesized
tccagcctacatgcatttca

SEQ ID NO: 66874 - DNA, 20 bp, Artificial Sequence
  chemically synthesized
ccagcctacatgcatttcaa

SEQ ID NO: 66875 - DNA, 20 bp, Artificial Sequence
  chemically synthesized
ttcaagggatttatactaca

SEQ ID NO: 66876 - DNA, 20 bp, Artificial Sequence
  chemically synthesized
ggatttatactacaaagatt

SEQ ID NO: 66877 - DNA, 20 bp, Artificial Sequence
  chemically synthesized
gatttatactacaaagattc

SEQ ID NO: 66878 - DNA, 20 bp, Artificial Sequence
  chemically synthesized
actacaaagattcaggtttt

SEQ ID NO: 66879 - DNA, 20 bp, Artificial Sequence
  chemically synthesized
attcaggttttaagtttgca

SEQ ID NO: 66880 - DNA, 20 bp, Artificial Sequence
  chemically synthesized
aagtttgcaaagacgtcata

SEQ ID NO: 66881 - DNA, 20 bp, Artificial Sequence
  chemically synthesized
agtttgcaaagacgtcatat

SEQ ID NO: 66882 - DNA, 20 bp, Artificial Sequence
  chemically synthesized
agacgtcatataggtacatt

SEQ ID NO: 66883 - DNA, 20 bp, Artificial Sequence
  chemically synthesized
taggtacattcagaattcta

SEQ ID NO: 66884 - DNA, 20 bp, Artificial Sequence
  chemically synthesized
gtacattcagaattctatgg

SEQ ID NO: 66885 - DNA, 20 bp, Artificial Sequence
  chemically synthesized
tacattcagaattctatggt

SEQ ID NO: 66886 - DNA, 20 bp, Artificial Sequence
  chemically synthesized
cagaattctatggtaggcac

SEQ ID NO: 66887 - DNA, 20 bp, Artificial Sequence
  chemically synthesized
ttctatggtaggcacaagct

SEQ ID NO: 66888 - DNA, 20 bp, Artificial Sequence
  chemically synthesized
taggcacaagctcagctttc

SEQ ID NO: 66889 - DNA, 20 bp, Artificial Sequence
  chemically synthesized
gcacaagctcagctttccag

SEQ ID NO: 66890 - DNA, 20 bp, Artificial Sequence
  chemically synthesized
tccagaagattcaatttgca

SEQ ID NO: 66891 - DNA, 20 bp, Artificial Sequence
  chemically synthesized
tccttttacacaccatgttc

SEQ ID NO: 66892 - DNA, 20 bp, Artificial Sequence
  chemically synthesized
accatgttcaagaaatcaac

SEQ ID NO: 66893 - DNA, 20 bp, Artificial Sequence
  chemically synthesized
gttcaagaaatcaactggac

SEQ ID NO: 66894 - DNA, 20 bp, Artificial Sequence
  chemically synthesized
aaatcaactggacaagcatc

SEQ ID NO: 66895 - DNA, 20 bp, Artificial Sequence
  chemically synthesized
agtaaacacctattgtgtac

SEQ ID NO: 66896 - DNA, 20 bp, Artificial Sequence
  chemically synthesized
gtaaacacctattgtgtacc

SEQ ID NO: 66897 - DNA, 20 bp, Artificial Sequence
  chemically synthesized
aacacctattgtgtaccagg

SEQ ID NO: 66898 - DNA, 20 bp, Artificial Sequence
  chemically synthesized
acacctattgtgtaccaggc

SEQ ID NO: 66899 - DNA, 20 bp, Artificial Sequence
  chemically synthesized
acctattgtgtaccaggcag

SEQ ID NO: 66900 - DNA, 20 bp, Artificial Sequence
  chemically synthesized
cctattgtgtaccaggcagg

SEQ ID NO: 66901 - DNA, 20 bp, Artificial Sequence
  chemically synthesized
gtaccaggcaggaggatgaa

SEQ ID NO: 66902 - DNA, 20 bp, Artificial Sequence
  chemically synthesized
taccaggcaggaggatgaaa

SEQ ID NO: 66903 - DNA, 20 bp, Artificial Sequence
  chemically synthesized
accaggcaggaggatgaaaa

SEQ ID NO: 66904 - DNA, 20 bp, Artificial Sequence
  chemically synthesized
ccaggcaggaggatgaaaag

SEQ ID NO: 66905 - DNA, 20 bp, Artificial Sequence
  chemically synthesized
gcaggaggatgaaaagggga

SEQ ID NO: 66906 - DNA, 20 bp, Artificial Sequence
  chemically synthesized
aggaggatgaaaaggggaaa

SEQ ID NO: 66907 - DNA, 20 bp, Artificial Sequence
  chemically synthesized
gaggatgaaaaggggaaaga

SEQ ID NO: 66908 - DNA, 20 bp, Artificial Sequence
  chemically synthesized
aaaaggggaaagagagctcc

SEQ ID NO: 66909 - DNA, 20 bp, Artificial Sequence
  chemically synthesized
ggaaagagagctcctggcct

SEQ ID NO: 66910 - DNA, 20 bp, Artificial Sequence
  chemically synthesized
ctggcctcagattgtacatg

SEQ ID NO: 66911 - DNA, 20 bp, Artificial Sequence
  chemically synthesized
ttgtacatgtggcatgacat

SEQ ID NO: 66912 - DNA, 20 bp, Artificial Sequence
  chemically synthesized
tgtacatgtggcatgacatg

SEQ ID NO: 66913 - DNA, 20 bp, Artificial Sequence
  chemically synthesized
gacatgaggcttgctctttc

SEQ ID NO: 66914 - DNA, 20 bp, Artificial Sequence
  chemically synthesized
atgaggcttgctctttctgg

SEQ ID NO: 66915 - DNA, 20 bp, Artificial Sequence
  chemically synthesized
tgaggcttgctctttctgga

SEQ ID NO: 66916 - DNA, 20 bp, Artificial Sequence
  chemically synthesized
gaggcttgctctttctggaa

SEQ ID NO: 66917 - DNA, 20 bp, Artificial Sequence
  chemically synthesized
tctggaagggctgtcgatac

SEQ ID NO: 66918 - DNA, 20 bp, Artificial Sequence
  chemically synthesized
ctggaagggctgtcgatact

SEQ ID NO: 66919 - DNA, 20 bp, Artificial Sequence
  chemically synthesized
gaagggctgtcgatactggg

SEQ ID NO: 66920 - DNA, 20 bp, Artificial Sequence
  chemically synthesized
gtcgatactgggaagaaaca

SEQ ID NO: 66921 - DNA, 20 bp, Artificial Sequence
  chemically synthesized
tcgatactgggaagaaacaa

SEQ ID NO: 66922 - DNA, 20 bp, Artificial Sequence
  chemically synthesized
gaatttatgatcctcccttg

SEQ ID NO: 66923 - DNA, 20 bp, Artificial Sequence
  chemically synthesized
gatcctcccttgcagatgca

SEQ ID NO: 66924 - DNA, 20 bp, Artificial Sequence
  chemically synthesized
cctcccttgcagatgcacag

SEQ ID NO: 66925 - DNA, 20 bp, Artificial Sequence
  chemically synthesized
gcagatgcacagcagattcc

SEQ ID NO: 66926 - DNA, 20 bp, Artificial Sequence
  chemically synthesized
acagcagattccgagtgaaa

SEQ ID NO: 66927 - DNA, 20 bp, Artificial Sequence
  chemically synthesized
gaaatggcctgctctgaatc

SEQ ID NO: 66928 - DNA, 20 bp, Artificial Sequence
  chemically synthesized
aaatggcctgctctgaatct

SEQ ID NO: 66929 - DNA, 20 bp, Artificial Sequence
  chemically synthesized
cctgctctgaatctaggtgc

SEQ ID NO: 66930 - DNA, 20 bp, Artificial Sequence
  chemically synthesized
tgctctgaatctaggtgctg

SEQ ID NO: 66931 - DNA, 20 bp, Artificial Sequence
  chemically synthesized
aatctaggtgctggagtcca

SEQ ID NO: 66932 - DNA, 20 bp, Artificial Sequence
  chemically synthesized
ctctttccactttgtttgca

SEQ ID NO: 66933 - DNA, 20 bp, Artificial Sequence
  chemically synthesized
tgtttgcaaagacctcactc

SEQ ID NO: 66934 - DNA, 20 bp, Artificial Sequence
  chemically synthesized
tttgcaaagacctcactcca

SEQ ID NO: 66935 - DNA, 20 bp, Artificial Sequence
  chemically synthesized
tgcaaagacctcactccaga

SEQ ID NO: 66936 - DNA, 20 bp, Artificial Sequence
  chemically synthesized
aagacctcactccagagagc

SEQ ID NO: 66937 - DNA, 20 bp, Artificial Sequence
  chemically synthesized
ctccagagagccagtgcaca

SEQ ID NO: 66938 - DNA, 20 bp, Artificial Sequence
  chemically synthesized
agagagccagtgcacaaaga

SEQ ID NO: 66939 - DNA, 20 bp, Artificial Sequence
  chemically synthesized
gtgcacaaagacagtgcaac

SEQ ID NO: 66940 - DNA, 20 bp, Artificial Sequence
  chemically synthesized
cacaaagacagtgcaaccag

SEQ ID NO: 66941 - DNA, 20 bp, Artificial Sequence
  chemically synthesized
acaaagacagtgcaaccagt

SEQ ID NO: 66942 - DNA, 20 bp, Artificial Sequence
  chemically synthesized
cagtgcaaccagtgggttga

SEQ ID NO: 66943 - DNA, 20 bp, Artificial Sequence
  chemically synthesized
tgggttgacagtgactccat

SEQ ID NO: 66944 - DNA, 20 bp, Artificial Sequence
  chemically synthesized
gggttgacagtgactccatg

SEQ ID NO: 66945 - DNA, 20 bp, Artificial Sequence
  chemically synthesized
tgacagtgactccatgaggt

SEQ ID NO: 66946 - DNA, 20 bp, Artificial Sequence
  chemically synthesized
gacagtgactccatgaggta

SEQ ID NO: 66947 - DNA, 20 bp, Artificial Sequence
  chemically synthesized
gtgactccatgaggtaaggt

SEQ ID NO: 66948 - DNA, 20 bp, Artificial Sequence
  chemically synthesized
gactccatgaggtaaggtca

SEQ ID NO: 66949 - DNA, 20 bp, Artificial Sequence
  chemically synthesized
aggtcagagttatccccatc

SEQ ID NO: 66950 - DNA, 20 bp, Artificial Sequence
  chemically synthesized
ccccatcgagcccgccatcg

SEQ ID NO: 66951 - DNA, 20 bp, Artificial Sequence
  chemically synthesized
tcgagcccgccatcgcagca

SEQ ID NO: 66952 - DNA, 20 bp, Artificial Sequence
  chemically synthesized
gagcccgccatcgcagcaca

SEQ ID NO: 66953 - DNA, 20 bp, Artificial Sequence
  chemically synthesized
cccgccatcgcagcacagag

SEQ ID NO: 66954 - DNA, 20 bp, Artificial Sequence
  chemically synthesized
ccgccatcgcagcacagagt

SEQ ID NO: 66955 - DNA, 20 bp, Artificial Sequence
  chemically synthesized
gccatcgcagcacagagtag

SEQ ID NO: 66956 - DNA, 20 bp, Artificial Sequence
  chemically synthesized
cagcacagagtaggagctca

SEQ ID NO: 66957 - DNA, 20 bp, Artificial Sequence
  chemically synthesized
aggagctcatggtttgctga

SEQ ID NO: 66958 - DNA, 20 bp, Artificial Sequence
  chemically synthesized
gagctcatggtttgctgaca

SEQ ID NO: 66959 - DNA, 20 bp, Artificial Sequence
  chemically synthesized
agctcatggtttgctgacag

SEQ ID NO: 66960 - DNA, 20 bp, Artificial Sequence
  chemically synthesized
tcatggtttgctgacagagg

SEQ ID NO: 66961 - DNA, 20 bp, Artificial Sequence
  chemically synthesized
tggtttgctgacagaggtgg

SEQ ID NO: 66962 - DNA, 20 bp, Artificial Sequence
  chemically synthesized
gtttgctgacagaggtggca

SEQ ID NO: 66963 - DNA, 20 bp, Artificial Sequence
  chemically synthesized
tttgctgacagaggtggcag

SEQ ID NO: 66964 - DNA, 20 bp, Artificial Sequence
  chemically synthesized
gctgacagaggtggcagagg

SEQ ID NO: 66965 - DNA, 20 bp, Artificial Sequence
  chemically synthesized
tccttcctgttgcctgtaat

SEQ ID NO: 66966 - DNA, 20 bp, Artificial Sequence
  chemically synthesized
ttgtatttgcaatgtgcttt

SEQ ID NO: 66967 - DNA, 20 bp, Artificial Sequence
  chemically synthesized
tatttgcaatgtgcttttgg

SEQ ID NO: 66968 - DNA, 20 bp, Artificial Sequence
  chemically synthesized
ttttggcagcttcctcatca

SEQ ID NO: 66969 - DNA, 20 bp, Artificial Sequence
  chemically synthesized
tttggcagcttcctcatcaa

SEQ ID NO: 66970 - DNA, 20 bp, Artificial Sequence
  chemically synthesized
tcctcatcaaaggcctcccc

SEQ ID NO: 66971 - DNA, 20 bp, Artificial Sequence
  chemically synthesized
ctcatcaaaggcctcccctg

SEQ ID NO: 66972 - DNA, 20 bp, Artificial Sequence
  chemically synthesized
tcaaaggcctcccctggagc

SEQ ID NO: 66973 - DNA, 20 bp, Artificial Sequence
  chemically synthesized
ggcctcccctggagcaagaa

SEQ ID NO: 66974 - DNA, 20 bp, Artificial Sequence
  chemically synthesized
tcccctggagcaagaataga

SEQ ID NO: 66975 - DNA, 20 bp, Artificial Sequence
  chemically synthesized
cccctggagcaagaatagat

SEQ ID NO: 66976 - DNA, 20 bp, Artificial Sequence
  chemically synthesized
cctggagcaagaatagatgg

SEQ ID NO: 66977 - DNA, 20 bp, Artificial Sequence
  chemically synthesized
ctttccctgctgctcccctt

SEQ ID NO: 66978 - DNA, 20 bp, Artificial Sequence
  chemically synthesized
tttccctgctgctccccttt

SEQ ID NO: 66979 - DNA, 20 bp, Artificial Sequence
  chemically synthesized
gctgctcccctttgggacct

SEQ ID NO: 66980 - DNA, 20 bp, Artificial Sequence
  chemically synthesized
gaccttggcctctcacctac

SEQ ID NO: 66981 - DNA, 20 bp, Artificial Sequence
  chemically synthesized
accttggcctctcacctacc

SEQ ID NO: 66982 - DNA, 20 bp, Artificial Sequence
  chemically synthesized
ccttggcctctcacctaccg

SEQ ID NO: 66983 - DNA, 20 bp, Artificial Sequence
  chemically synthesized
gctgcgatggcgggctcgat

SEQ ID NO: 66984 - DNA, 20 bp, Artificial Sequence
  chemically synthesized
ataactctgaccttacctca

SEQ ID NO: 66985 - DNA, 20 bp, Artificial Sequence
  chemically synthesized
gtctttgtgcactggctctc

SEQ ID NO: 66986 - DNA, 20 bp, Artificial Sequence
  chemically synthesized
tcagagcaggccatttcact

SEQ ID NO: 66987 - DNA, 20 bp, Artificial Sequence
  chemically synthesized
tctgctgtgcatctgcaagg

SEQ ID NO: 66988 - DNA, 20 bp, Artificial Sequence
  chemically synthesized
tggtacacaataggtgttta

SEQ ID NO: 66989 - DNA, 20 bp, Artificial Sequence
  chemically synthesized
tcttgaacatggtgtgtaaa

SEQ ID NO: 66990 - DNA, 20 bp, Artificial Sequence
  chemically synthesized
gtaaaaggaatctttgcaaa

SEQ ID NO: 66991 - DNA, 20 bp, Artificial Sequence
  chemically synthesized
agctgagcttgtgcctacca

SEQ ID NO: 66992 - DNA, 20 bp, Artificial Sequence
  chemically synthesized
cttgtgcctaccatagaatt

SEQ ID NO: 66993 - DNA, 20 bp, Artificial Sequence
  chemically synthesized
cgtctttgcaaacttaaaac

SEQ ID NO: 66994 - DNA, 20 bp, Artificial Sequence
  chemically synthesized
tagttggtaaggtcagtgtg

SEQ ID NO: 66995 - DNA, 20 bp, Artificial Sequence
  chemically synthesized
cataaagggcagaggccgga

SEQ ID NO: 66996 - DNA, 20 bp, Artificial Sequence
  chemically synthesized
gccaggttaaggccagtgga

SEQ ID NO: 66997 - DNA, 20 bp, Artificial Sequence
  chemically synthesized
aaagaattcggtgggcagcg

SEQ ID NO: 66998 - DNA, 20 bp, Artificial Sequence
  chemically synthesized
gggcagcgaggagtccacag

SEQ ID NO: 66999 - DNA, 20 bp, Artificial Sequence
  chemically synthesized
aaggtgggcccggcagaact

SEQ ID NO: 67000 - DNA, 20 bp, Artificial Sequence
  chemically synthesized
ttggagtctggcatcccacg

SEQ ID NO: 67001 - DNA, 20 bp, Artificial Sequence
  chemically synthesized
ggcctgccttccagcccagt

SEQ ID NO: 67002 - DNA, 20 bp, Artificial Sequence
  chemically synthesized
ttccagcccagttaggattt

SEQ ID NO: 67003 - DNA, 20 bp, Artificial Sequence
  chemically synthesized
gaaacctgatcctccagtcc

SEQ ID NO: 67004 - DNA, 20 bp, Artificial Sequence
  chemically synthesized
tccgttaatgtttaatcaga

SEQ ID NO: 67005 - DNA, 20 bp, Artificial Sequence
  chemically synthesized
gcgggcgccgccgttcagtt

SEQ ID NO: 67006 - DNA, 20 bp, Artificial Sequence
  chemically synthesized
agttcagggtctgagcctgg

SEQ ID NO: 67007 - DNA, 20 bp, Artificial Sequence
  chemically synthesized
agcggctcccagctcccagc

SEQ ID NO: 67008 - DNA, 20 bp, Artificial Sequence
  chemically synthesized
tgctgctgctgctgctgctc

SEQ ID NO: 67009 - DNA, 20 bp, Artificial Sequence
  chemically synthesized
ttccaccgctgcgccaaggt

SEQ ID NO: 67010 - DNA, 20 bp, Artificial Sequence
  chemically synthesized
ctgcgccaaggtgcgggtgt

SEQ ID NO: 67011 - DNA, 20 bp, Artificial Sequence
  chemically synthesized
cccccatgtaagagaggaag

SEQ ID NO: 67012 - DNA, 20 bp, Artificial Sequence
  chemically synthesized
aggcaaggcggcgggggagg

SEQ ID NO: 67013 - DNA, 20 bp, Artificial Sequence
  chemically synthesized
ctattcagtgggaaggttcg

SEQ ID NO: 67014 - DNA, 20 bp, Artificial Sequence
  chemically synthesized
aagggcgagcagagcactgc

SEQ ID NO: 67015 - DNA, 20 bp, Artificial Sequence
  chemically synthesized
tctgcctcgccgcggcacag

SEQ ID NO: 67016 - DNA, 20 bp, Artificial Sequence
  chemically synthesized
gccgcggcacaggtgggtga

SEQ ID NO: 67017 - DNA, 20 bp, Artificial Sequence
  chemically synthesized
cggcacaggtgggtgaagga

SEQ ID NO: 67018 - DNA, 20 bp, Artificial Sequence
  chemically synthesized
aaagcgggcttgccattata

SEQ ID NO: 67019 - DNA, 20 bp, Artificial Sequence
  chemically synthesized
tttggaaaacatgggcagcg

SEQ ID NO: 67020 - DNA, 20 bp, Artificial Sequence
  chemically synthesized
ggccctacccgagacagggg

SEQ ID NO: 67021 - DNA, 20 bp, Artificial Sequence
  chemically synthesized
gtctgccgaccgtgtgcggg

SEQ ID NO: 67022 - DNA, 20 bp, Artificial Sequence
  chemically synthesized
aggttctgtgtcccccagct

SEQ ID NO: 67023 - DNA, 20 bp, Artificial Sequence
  chemically synthesized
ccccagcttggagtcagatg

SEQ ID NO: 67024 - DNA, 20 bp, Artificial Sequence
  chemically synthesized
gcttggagtcagatgtgggg

SEQ ID NO: 67025 - DNA, 20 bp, Artificial Sequence
  chemically synthesized
aagggaaagttctgttgacc

SEQ ID NO: 67026 - DNA, 20 bp, Artificial Sequence
  chemically synthesized
acttacaatgcaagccccgg

SEQ ID NO: 67027 - DNA, 20 bp, Artificial Sequence
  chemically synthesized
ctgcctgcccacgcttctgt

SEQ ID NO: 67028 - DNA, 20 bp, Artificial Sequence
  chemically synthesized
cacgcttctgtctgagtgtg

SEQ ID NO: 67029 - DNA, 20 bp, Artificial Sequence
  chemically synthesized
tgtctgagtgtgctgggtgg

SEQ ID NO: 67030 - DNA, 20 bp, Artificial Sequence
  chemically synthesized
ctgagcctttgactttctcg

SEQ ID NO: 67031 - DNA, 20 bp, Artificial Sequence
  chemically synthesized
gactttctcgagggatgttg

SEQ ID NO: 67032 - DNA, 20 bp, Artificial Sequence
  chemically synthesized
ggatgttgtggggttgtggc

SEQ ID NO: 67033 - DNA, 20 bp, Artificial Sequence
  chemically synthesized
aaacaactgttctggaaata

SEQ ID NO: 67034 - DNA, 20 bp, Artificial Sequence
  chemically synthesized
tgagtaccccatcctgagag

SEQ ID NO: 67035 - DNA, 20 bp, Artificial Sequence
  chemically synthesized
accacctgaaccaagccctt

SEQ ID NO: 67036 - DNA, 20 bp, Artificial Sequence
  chemically synthesized
tcattcaatggttattttgt

SEQ ID NO: 67037 - DNA, 20 bp, Artificial Sequence
  chemically synthesized
caatggttattttgtgggaa

SEQ ID NO: 67038 - DNA, 20 bp, Artificial Sequence
  chemically synthesized
tattttgtgggaatcgaatt

SEQ ID NO: 67039 - DNA, 20 bp, Artificial Sequence
  chemically synthesized
tcaccccaggtgcattagaa

SEQ ID NO: 67040 - DNA, 20 bp, Artificial Sequence
  chemically synthesized
agaactgacactccactgca

SEQ ID NO: 67041 - DNA, 20 bp, Artificial Sequence
  chemically synthesized
ttagcggaaggcattttcag

SEQ ID NO: 67042 - DNA, 20 bp, Artificial Sequence
  chemically synthesized
tgggtctttgaagcattagt

SEQ ID NO: 67043 - DNA, 20 bp, Artificial Sequence
  chemically synthesized
ttcagcgatgatggtgtcat

SEQ ID NO: 67044 - DNA, 20 bp, Artificial Sequence
  chemically synthesized
gtgtcatgagaattttattc

SEQ ID NO: 67045 - DNA, 20 bp, Artificial Sequence
  chemically synthesized
tttttcttttttttttgaga

SEQ ID NO: 67046 - DNA, 20 bp, Artificial Sequence
  chemically synthesized
ttcgctcttgttgcccaggc

SEQ ID NO: 67047 - DNA, 20 bp, Artificial Sequence
  chemically synthesized
ctcactgcaacatctgtctc

SEQ ID NO: 67048 - DNA, 20 bp, Artificial Sequence
  chemically synthesized
gcctcagcctcccaagaagc

SEQ ID NO: 67049 - DNA, 20 bp, Artificial Sequence
  chemically synthesized
ttttgtatttttagtagaga

SEQ ID NO: 67050 - DNA, 20 bp, Artificial Sequence
  chemically synthesized
gcaaactcctgacctcctca

SEQ ID NO: 67051 - DNA, 20 bp, Artificial Sequence
  chemically synthesized
gcctcagcctcccaaagtgc

SEQ ID NO: 67052 - DNA, 20 bp, Artificial Sequence
  chemically synthesized
attatttttaatttagttgt

SEQ ID NO: 67053 - DNA, 20 bp, Artificial Sequence
  chemically synthesized
accgttttggccctaaggct

SEQ ID NO: 67054 - DNA, 20 bp, Artificial Sequence
  chemically synthesized
gccctaaggctttgggtaaa

SEQ ID NO: 67055 - DNA, 20 bp, Artificial Sequence
  chemically synthesized
ggactctgttctactctgac

SEQ ID NO: 67056 - DNA, 20 bp, Artificial Sequence
  chemically synthesized
agatgcatatatacagagat

SEQ ID NO: 67057 - DNA, 20 bp, Artificial Sequence
  chemically synthesized
gtaggggccaaggaggagca

SEQ ID NO: 67058 - DNA, 20 bp, Artificial Sequence
  chemically synthesized
tggggcctaatgggaggtgt

SEQ ID NO: 67059 - DNA, 20 bp, Artificial Sequence
  chemically synthesized
ttggtgccgtccttgtgata

SEQ ID NO: 67060 - DNA, 20 bp, Artificial Sequence
  chemically synthesized
catgcttcctggagagcttg

SEQ ID NO: 67061 - DNA, 20 bp, Artificial Sequence
  chemically synthesized
agagcttgcagaatcatgag

SEQ ID NO: 67062 - DNA, 20 bp, Artificial Sequence
  chemically synthesized
tgcctgcatttgtagagcat

SEQ ID NO: 67063 - DNA, 20 bp, Artificial Sequence
  chemically synthesized
gtatctgaggctccgagagg

SEQ ID NO: 67064 - DNA, 20 bp, Artificial Sequence
  chemically synthesized
caaccagtaaatattggagc

SEQ ID NO: 67065 - DNA, 20 bp, Artificial Sequence
  chemically synthesized
tctgactggggcatggggga

SEQ ID NO: 67066 - DNA, 20 bp, Artificial Sequence
  chemically synthesized
gcgaccaggcccgtagagag

SEQ ID NO: 67067 - DNA, 20 bp, Artificial Sequence
  chemically synthesized
gtacagaggaaaacctgttg

SEQ ID NO: 67068 - DNA, 20 bp, Artificial Sequence
  chemically synthesized
cccgtagttcccatttttgc

SEQ ID NO: 67069 - DNA, 20 bp, Artificial Sequence
  chemically synthesized
tgaaagtgttatataaccat

SEQ ID NO: 67070 - DNA, 20 bp, Artificial Sequence
  chemically synthesized
aataataatagttggcctat

SEQ ID NO: 67071 - DNA, 20 bp, Artificial Sequence
  chemically synthesized
ttttgttgtaatttgtaagt

SEQ ID NO: 67072 - DNA, 20 bp, Artificial Sequence
  chemically synthesized
ggggtgagataaagtacacc

SEQ ID NO: 67073 - DNA, 20 bp, Artificial Sequence
  chemically synthesized
taaagtacacctagggtttg

SEQ ID NO: 67074 - DNA, 20 bp, Artificial Sequence
  chemically synthesized
tgttcctccttgcatggggc

SEQ ID NO: 67075 - DNA, 20 bp, Artificial Sequence
  chemically synthesized
gcaggcccaggctgcccgcc

SEQ ID NO: 67076 - DNA, 20 bp, Artificial Sequence
  chemically synthesized
ttcctggcttcctggtgaag

SEQ ID NO: 67077 - DNA, 20 bp, Artificial Sequence
  chemically synthesized
gctggtgagccacccttttt

SEQ ID NO: 67078 - DNA, 20 bp, Artificial Sequence
  chemically synthesized
aagtatgtattgagcactta

SEQ ID NO: 67079 - DNA, 20 bp, Artificial Sequence
  chemically synthesized
gtaactactggctttctgta

SEQ ID NO: 67080 - DNA, 20 bp, Artificial Sequence
  chemically synthesized
aggggaccacacagacagct

SEQ ID NO: 67081 - DNA, 20 bp, Artificial Sequence
  chemically synthesized
cagacagctaggggtagagc

SEQ ID NO: 67082 - DNA, 20 bp, Artificial Sequence
  chemically synthesized
aacctgtagggacaaggccc

SEQ ID NO: 67083 - DNA, 20 bp, Artificial Sequence
  chemically synthesized
cctgggatgttcagtggagc

SEQ ID NO: 67084 - DNA, 20 bp, Artificial Sequence
  chemically synthesized
tttataaaaaagcatgactc

SEQ ID NO: 67085 - DNA, 20 bp, Artificial Sequence
  chemically synthesized
cctttgaagctgttgctatc

SEQ ID NO: 67086 - DNA, 20 bp, Artificial Sequence
  chemically synthesized
gtgaagtcccttctttagga

SEQ ID NO: 67087 - DNA, 20 bp, Artificial Sequence
  chemically synthesized
cagggtggccctcctccctc

SEQ ID NO: 67088 - DNA, 20 bp, Artificial Sequence
  chemically synthesized
gtggaggggcagaaagggga

SEQ ID NO: 67089 - DNA, 20 bp, Artificial Sequence
  chemically synthesized
aagatttgaagcactagggc

SEQ ID NO: 67090 - DNA, 20 bp, Artificial Sequence
  chemically synthesized
agcactagggccagggtgag

SEQ ID NO: 67091 - DNA, 20 bp, Artificial Sequence
  chemically synthesized
cctaaagaagggacttcact

SEQ ID NO: 67092 - DNA, 20 bp, Artificial Sequence
  chemically synthesized
ctggatagcaacagcttcaa

SEQ ID NO: 67093 - DNA, 20 bp, Artificial Sequence
  chemically synthesized
ttcaaaggaattttggaccc

SEQ ID NO: 67094 - DNA, 20 bp, Artificial Sequence
  chemically synthesized
ggcagcagatgcattggcac

SEQ ID NO: 67095 - DNA, 20 bp, Artificial Sequence
  chemically synthesized
aatggctggcaggcagacca

SEQ ID NO: 67096 - DNA, 20 bp, Artificial Sequence
  chemically synthesized
ggggcatggccaggcttaaa

SEQ ID NO: 67097 - DNA, 20 bp, Artificial Sequence
  chemically synthesized
caggaagtgccattcccaaa

SEQ ID NO: 67098 - DNA, 20 bp, Artificial Sequence
  chemically synthesized
agaaggccatggaagacatg

SEQ ID NO: 67099 - DNA, 20 bp, Artificial Sequence
  chemically synthesized
gtgcgctctgactgcgagag

SEQ ID NO: 67100 - DNA, 20 bp, Artificial Sequence
  chemically synthesized
gtaggtgccaggcaacctcc

SEQ ID NO: 67101 - DNA, 20 bp, Artificial Sequence
  chemically synthesized
ttacaacaaaagagacacaa

SEQ ID NO: 67102 - DNA, 20 bp, Artificial Sequence
  chemically synthesized
cccctcccccatgccccagt

SEQ ID NO: 67103 - DNA, 20 bp, Artificial Sequence
  chemically synthesized
ggagccaggaaaccgtggac

SEQ ID NO: 67104 - DNA, 20 bp, Artificial Sequence
  chemically synthesized
ataggcctgctgggaaagtc

SEQ ID NO: 67105 - DNA, 20 bp, Artificial Sequence
  chemically synthesized
gctctacaaatgcaggcaga

SEQ ID NO: 67106 - DNA, 20 bp, Artificial Sequence
  chemically synthesized
ccttttgtgttgctatataa

SEQ ID NO: 67107 - DNA, 20 bp, Artificial Sequence
  chemically synthesized
atataaaggaatacctgaag

SEQ ID NO: 67108 - DNA, 20 bp, Artificial Sequence
  chemically synthesized
gtgagtaatttacaaggaaa

SEQ ID NO: 67109 - DNA, 20 bp, Artificial Sequence
  chemically synthesized
gacggcaccaagcctttcac

SEQ ID NO: 67110 - DNA, 20 bp, Artificial Sequence
  chemically synthesized
cactggctccccacagcctc

SEQ ID NO: 67111 - DNA, 20 bp, Artificial Sequence
  chemically synthesized
tatgcatcttggactccagt

SEQ ID NO: 67112 - DNA, 20 bp, Artificial Sequence
  chemically synthesized
ggactccagtcagagtagaa

SEQ ID NO: 67113 - DNA, 20 bp, Artificial Sequence
  chemically synthesized
ttttgaacctcagaacttgt

SEQ ID NO: 67114 - DNA, 20 bp, Artificial Sequence
  chemically synthesized
gaaaggcagtaatgggcaat

SEQ ID NO: 67115 - DNA, 20 bp, Artificial Sequence
  chemically synthesized
ggcaatcagagtctgcttgg

SEQ ID NO: 67116 - DNA, 20 bp, Artificial Sequence
  chemically synthesized
taatctatgcagcaaaatat

SEQ ID NO: 67117 - DNA, 20 bp, Artificial Sequence
  chemically synthesized
aacattttacatttcagacg

SEQ ID NO: 67118 - DNA, 20 bp, Artificial Sequence
  chemically synthesized
actttgggaggctgaggcgg

SEQ ID NO: 67119 - DNA, 20 bp, Artificial Sequence
  chemically synthesized
gaggcgggaggatcacctcc

SEQ ID NO: 67120 - DNA, 20 bp, Artificial Sequence
  chemically synthesized
tcggatccactgaggaggtc

SEQ ID NO: 67121 - DNA, 20 bp, Artificial Sequence
  chemically synthesized
ttcatggtacctcctaatcc

SEQ ID NO: 67122 - DNA, 20 bp, Artificial Sequence
  chemically synthesized
tgccttccgctaaataaaaa

SEQ ID NO: 67123 - DNA, 20 bp, Artificial Sequence
  chemically synthesized
ttccgctaaataaaaattga

SEQ ID NO: 67124 - DNA, 20 bp, Artificial Sequence
  chemically synthesized
ataaaaattgaatgaattgg

SEQ ID NO: 67125 - DNA, 20 bp, Artificial Sequence
  chemically synthesized
tgggagagtactctgtgcag

SEQ ID NO: 67126 - DNA, 20 bp, Artificial Sequence
  chemically synthesized
aaacccagttctaatgcacc

SEQ ID NO: 67127 - DNA, 20 bp, Artificial Sequence
  chemically synthesized
gtttctcatgactaaaagaa

SEQ ID NO: 67128 - DNA, 20 bp, Artificial Sequence
  chemically synthesized
cgattcccacaaaataacca

SEQ ID NO: 67129 - DNA, 20 bp, Artificial Sequence
  chemically synthesized
tcccacaaaataaccattga

SEQ ID NO: 67130 - DNA, 20 bp, Artificial Sequence
  chemically synthesized
acaaaataaccattgaatga

SEQ ID NO: 67131 - DNA, 20 bp, Artificial Sequence
  chemically synthesized
gcctctgcttactcacctct

SEQ ID NO: 67132 - DNA, 20 bp, Artificial Sequence
  chemically synthesized
tgcttactcacctctcagga

SEQ ID NO: 67133 - DNA, 20 bp, Artificial Sequence
  chemically synthesized
aggaagagggctatactgag

SEQ ID NO: 67134 - DNA, 20 bp, Artificial Sequence
  chemically synthesized
agaagcgtgggcaggcagct

SEQ ID NO: 67135 - DNA, 20 bp, Artificial Sequence
  chemically synthesized
gggcaggcagctgtgagtgg

SEQ ID NO: 67136 - DNA, 20 bp, Artificial Sequence
  chemically synthesized
agattaggcaatggaggctc

SEQ ID NO: 67137 - DNA, 20 bp, Artificial Sequence
  chemically synthesized
gcctgagggccagaagctgg

SEQ ID NO: 67138 - DNA, 20 bp, Artificial Sequence
  chemically synthesized
tgaggcgccgggctcagctc

SEQ ID NO: 67139 - DNA, 20 bp, Artificial Sequence
  chemically synthesized
caccaagggcccttccctgc

SEQ ID NO: 67140 - DNA, 20 bp, Artificial Sequence
  chemically synthesized
aaaggacgccaatgggcctc

SEQ ID NO: 67141 - DNA, 20 bp, Artificial Sequence
  chemically synthesized
ttttcttcggctgaaacaga

SEQ ID NO: 67142 - DNA, 20 bp, Artificial Sequence
  chemically synthesized
aacagatggaatactagagc

SEQ ID NO: 67143 - DNA, 20 bp, Artificial Sequence
  chemically synthesized
cttcccaccccgcccctgtc

SEQ ID NO: 67144 - DNA, 20 bp, Artificial Sequence
  chemically synthesized
cagaaactgggaaatctggg

SEQ ID NO: 67145 - DNA, 20 bp, Artificial Sequence
  chemically synthesized
tgctcgcccttcctcggcct

SEQ ID NO: 67146 - DNA, 20 bp, Artificial Sequence
  chemically synthesized
caaccccgcgaaccttccca

SEQ ID NO: 67147 - DNA, 20 bp, Artificial Sequence
  chemically synthesized
agcaccgcaccgtcccggct

SEQ ID NO: 67148 - DNA, 20 bp, Artificial Sequence
  chemically synthesized
aggtggctgtggttccgtgc

SEQ ID NO: 67149 - DNA, 20 bp, Artificial Sequence
  chemically synthesized
agggcgcgtgaaggggcgcg

SEQ ID NO: 67150 - DNA, 20 bp, Artificial Sequence
  chemically synthesized
acgtcgctgcggaaaccttc

SEQ ID NO: 67151 - DNA, 20 bp, Artificial Sequence
  chemically synthesized
ctgcggaaaccttctagggt

SEQ ID NO: 67152 - DNA, 20 bp, Artificial Sequence
  chemically synthesized
ttaacggaacccccggactg

SEQ ID NO: 67153 - DNA, 20 bp, Artificial Sequence
  chemically synthesized
ctcccgcctctcaccctgcg

SEQ ID NO: 67154 - DNA, 20 bp, Artificial Sequence
  chemically synthesized
gcccaccttttcagtgtttc

SEQ ID NO: 67155 - DNA, 20 bp, Artificial Sequence
  chemically synthesized
cctgctgaccagtgagactt

SEQ ID NO: 67156 - DNA, 20 bp, Artificial Sequence
  chemically synthesized
tgtggactcctcgctgccca

SEQ ID NO: 67157 - DNA, 20 bp, Artificial Sequence
  chemically synthesized
tccagcctacatgcatttca

SEQ ID NO: 67158 - DNA, 20 bp, Artificial Sequence
  chemically synthesized
agacgtcatataggtacatt

SEQ ID NO: 67159 - DNA, 20 bp, Artificial Sequence
  chemically synthesized
acctattgtgtaccaggcag

SEQ ID NO: 67160 - DNA, 20 bp, Artificial Sequence
  chemically synthesized
gatactgggaagaaacaaag

SEQ ID NO: 67161 - DNA, 20 bp, Artificial Sequence
  chemically synthesized
ttgcagatgcacagcagatt

SEQ ID NO: 67162 - DNA, 20 bp, Artificial Sequence
  chemically synthesized
tccgagtgaaatggcctgct

SEQ ID NO: 67163 - DNA, 20 bp, Artificial Sequence
  chemically synthesized
cctgctctgaatctaggtgc

SEQ ID NO: 67164 - DNA, 20 bp, Artificial Sequence
  chemically synthesized
gcacaaagacagtgcaacca

SEQ ID NO: 67165 - DNA, 20 bp, Artificial Sequence
  chemically synthesized
gtgactccatgaggtaaggt

SEQ ID NO: 67166 - DNA, 20 bp, Artificial Sequence
  chemically synthesized
tcgagcccgccatcgcagca

SEQ ID NO: 67167 - DNA, 20 bp, Artificial Sequence
  chemically synthesized
tccttcctgttgcctgtaat

SEQ ID NO: 67168 - DNA, 20 bp, Artificial Sequence
  chemically synthesized
tcaaaggcctcccctggagc

SEQ ID NO: 67169 - DNA, 20 bp, Artificial Sequence
  chemically synthesized
gaccttggcctctcacctac

SEQ ID NO: 67170 - DNA, 20 bp, Artificial Sequence
  chemically synthesized
tcccagtatcgacagccctt

SEQ ID NO: 67171 - DNA, 20 bp, Artificial Sequence
  chemically synthesized
aagctgagcttgtgcctacc

SEQ ID NO: 67172 - DNA, 20 bp, Artificial Sequence
  chemically synthesized
tgccaggttaaggccagtgg

SEQ ID NO: 67173 - DNA, 20 bp, Artificial Sequence
  chemically synthesized
ctgggaactgcaccaggcac

SEQ ID NO: 67174 - DNA, 20 bp, Artificial Sequence
  chemically synthesized
gtattccatctgtttcagcc

SEQ ID NO: 67175 - DNA, 20 bp, Artificial Sequence
  chemically synthesized
ttgtggggttgtggccagga

SEQ ID NO: 67176 - DNA, 20 bp, Artificial Sequence
  chemically synthesized
ttattttgtgggaatcgaat

SEQ ID NO: 67177 - DNA, 20 bp, Artificial Sequence
  chemically synthesized
atgaaaatattttttggcaa

SEQ ID NO: 67178 - DNA, 20 bp, Artificial Sequence
  chemically synthesized
caatccttttcttttagtca

SEQ ID NO: 67179 - DNA, 20 bp, Artificial Sequence
  chemically synthesized
gttcagcgatgatggtgtca

SEQ ID NO: 67180 - DNA, 20 bp, Artificial Sequence
  chemically synthesized
ccatgcttcctggagagctt

SEQ ID NO: 67181 - DNA, 20 bp, Artificial Sequence
  chemically synthesized
agtaactactggctttctgt

SEQ ID NO: 67182 - DNA, 20 bp, Artificial Sequence
  chemically synthesized
gtcacatcttcggtggaggg

SEQ ID NO: 67183 - DNA, 20 bp, Artificial Sequence
  chemically synthesized
aagcactagggccagggtga

SEQ ID NO: 67184 - DNA, 20 bp, Artificial Sequence
  chemically synthesized
aggcagcagatgcattggca

SEQ ID NO: 67185 - DNA, 20 bp, Artificial Sequence
  chemically synthesized
aggcttaaagggaattctat

SEQ ID NO: 67186 - DNA, 20 bp, Artificial Sequence
  chemically synthesized
aggaggaacatgatgacatg

SEQ ID NO: 67187 - DNA, 20 bp, Artificial Sequence
  chemically synthesized
ccccctcccccatgccccag

SEQ ID NO: 67188 - DNA, 20 bp, Artificial Sequence
  chemically synthesized
aggcaacacttcttaaagag

SEQ ID NO: 67189 - DNA, 20 bp, Artificial Sequence
  chemically synthesized
cctcagaacttgtttggatt

SEQ ID NO: 67190 - DNA, 20 bp, Artificial Sequence
  chemically synthesized
gggcaatcagagtctgcttg

SEQ ID NO: 67191 - DNA, 20 bp, Artificial Sequence
  chemically synthesized
gaaactccatctcaaaaaaa

SEQ ID NO: 67192 - DNA, 20 bp, Artificial Sequence
  chemically synthesized
gttcatggtacctcctaatc

SEQ ID NO: 67193 - DNA, 20 bp, Artificial Sequence
  chemically synthesized
gcctcagtttctcatgacta

SEQ ID NO: 67194 - DNA, 20 bp, Artificial Sequence
  chemically synthesized
tgttccaaacttccaccaga

SEQ ID NO: 67195 - DNA, 20 bp, Artificial Sequence
  chemically synthesized
cacaaccccacaacatccct

SEQ ID NO: 67196 - DNA, 20 bp, Artificial Sequence
  chemically synthesized
tgggcaggcagctgtgagtg

SEQ ID NO: 67197 - DNA, 20 bp, Artificial Sequence
  chemically synthesized
aagtcctgggctggtaatac

SEQ ID NO: 67198 - DNA, 20 bp, Artificial Sequence
  chemically synthesized
taaaggacgccaatgggcct

SEQ ID NO: 67199 - DNA, 20 bp, Artificial Sequence
  chemically synthesized
gagcatgagttctgtgtcat

SEQ ID NO: 67200 - DNA, 20 bp, Artificial Sequence
  chemically synthesized
cccacctgtgccgcggcgag

SEQ ID NO: 67201 - DNA, 20 bp, Artificial Sequence
  chemically synthesized
cgtcagattacgcgcagagg

SEQ ID NO: 67202 - DNA, 20 bp, Artificial Sequence
  chemically synthesized
aagacgtcatataggtacat

SEQ ID NO: 67203 - DNA, 20 bp, Artificial Sequence
  chemically synthesized
ttccttttacacaccatgtt

SEQ ID NO: 67204 - DNA, 20 bp, Artificial Sequence
  chemically synthesized
ggaagggctgtcgatactgg

SEQ ID NO: 67205 - DNA, 20 bp, Artificial Sequence
  chemically synthesized
atcaaaggcctcccctggag

SEQ ID NO: 67206 - DNA, 20 bp, Artificial Sequence
  chemically synthesized
atatgacgtctttgcaaact

SEQ ID NO: 67207 - DNA, 20 bp, Artificial Sequence
  chemically synthesized
gtgggttccgatttggtttg

SEQ ID NO: 67208 - DNA, 20 bp, Artificial Sequence
  chemically synthesized
atttcaagttaccactgctc

SEQ ID NO: 67209 - DNA, 20 bp, Artificial Sequence
  chemically synthesized
gaacaaagatacagagctgg

SEQ ID NO: 67210 - DNA, 20 bp, Artificial Sequence
  chemically synthesized
tctgaaatgtaaaatgttac

SEQ ID NO: 67211 - DNA, 20 bp, Artificial Sequence
  chemically synthesized
tccaaacaagttctgaggtt

SEQ ID NO: 67212 - DNA, 20 bp, Artificial Sequence
  chemically synthesized
agttggagcagacaagagct

SEQ ID NO: 67213 - DNA, 20 bp, Artificial Sequence
  chemically synthesized
agctgggtgcaggtacagag

SEQ ID NO: 67214 - DNA, 20 bp, Artificial Sequence
  chemically synthesized
cctagtgcttcaaatcttaa

SEQ ID NO: 67215 - DNA, 20 bp, Artificial Sequence
  chemically synthesized
ggtggtgcagaagcacaaat

SEQ ID NO: 67216 - DNA, 20 bp, Artificial Sequence
  chemically synthesized
tttacccaaagccttagggc

SEQ ID NO: 67217 - DNA, 20 bp, Artificial Sequence
  chemically synthesized
accatcaaataaatcacaaa

SEQ ID NO: 67218 - DNA, 20 bp, Artificial Sequence
  chemically synthesized
ggtcacactgcagacaggga

SEQ ID NO: 67219 - DNA, 20 bp, Artificial Sequence
  chemically synthesized
gattacgcgcagagggaaga

SEQ ID NO: 67220 - DNA, 20 bp, Artificial Sequence
  chemically synthesized
atcaactttggactccagca

SEQ ID NO: 67221 - DNA, 20 bp, Artificial Sequence
  chemically synthesized
agggaggatcataaattcgc

SEQ ID NO: 67222 - DNA, 20 bp, Artificial Sequence
  chemically synthesized
cctcctgcctggtacacaat

SEQ ID NO: 67223 - DNA, 20 bp, Artificial Sequence
  chemically synthesized
gtacacaataggtgtttact

SEQ ID NO: 67224 - DNA, 20 bp, Artificial Sequence
  chemically synthesized
tgtttactggatgcttgtcc

SEQ ID NO: 67225 - DNA, 20 bp, Artificial Sequence
  chemically synthesized
aaattgaatcttctggaaag

SEQ ID NO: 67226 - DNA, 20 bp, Artificial Sequence
  chemically synthesized
gaggccggagggggtccagg

SEQ ID NO: 67227 - DNA, 20 bp, Artificial Sequence
  chemically synthesized
tgggcagcgaggagtccaca

SEQ ID NO: 67228 - DNA, 20 bp, Artificial Sequence
  chemically synthesized
cagcgaggagtccacagtag

SEQ ID NO: 67229 - DNA, 20 bp, Artificial Sequence
  chemically synthesized
cggcctgccttccagcccag

SEQ ID NO: 67230 - DNA, 20 bp, Artificial Sequence
  chemically synthesized
ttccagcccagttaggattt

SEQ ID NO: 67231 - DNA, 20 bp, Artificial Sequence
  chemically synthesized
tccctctgcgcgtaatctga

SEQ ID NO: 67232 - DNA, 20 bp, Artificial Sequence
  chemically synthesized
ctccagtccgggggttccgt

SEQ ID NO: 67233 - DNA, 20 bp, Artificial Sequence
  chemically synthesized
cgtcaagcacccacacccta

SEQ ID NO: 67234 - DNA, 20 bp, Artificial Sequence
  chemically synthesized
cagcggctcccagctcccag

SEQ ID NO: 67235 - DNA, 20 bp, Artificial Sequence
  chemically synthesized
ccgcagccgggacggtgcgg

SEQ ID NO: 67236 - DNA, 20 bp, Artificial Sequence
  chemically synthesized
ggtgctgtttcctctcgggc

SEQ ID NO: 67237 - DNA, 20 bp, Artificial Sequence
  chemically synthesized
agtgcaggtcgccgagggct

SEQ ID NO: 67238 - DNA, 20 bp, Artificial Sequence
  chemically synthesized
agcactgccaggatatcctg

SEQ ID NO: 67239 - DNA, 20 bp, Artificial Sequence
  chemically synthesized
aggatatcctgcccagattt

SEQ ID NO: 67240 - DNA, 20 bp, Artificial Sequence
  chemically synthesized
ctgcaccaggcacagagaaa

SEQ ID NO: 67241 - DNA, 20 bp, Artificial Sequence
  chemically synthesized
gggcttgccattatagtggg

SEQ ID NO: 67242 - DNA, 20 bp, Artificial Sequence
  chemically synthesized
gccattatagtgggttccga

SEQ ID NO: 67243 - DNA, 20 bp, Artificial Sequence
  chemically synthesized
aactcatgctctagtattcc

SEQ ID NO: 67244 - DNA, 20 bp, Artificial Sequence
  chemically synthesized
gtctgccgaccgtgtgcggg

SEQ ID NO: 67245 - DNA, 20 bp, Artificial Sequence
  chemically synthesized
cgagtttgctcaacaactct

SEQ ID NO: 67246 - DNA, 20 bp, Artificial Sequence
  chemically synthesized
cttctggccctcaggctgtg

SEQ ID NO: 67247 - DNA, 20 bp, Artificial Sequence
  chemically synthesized
cttcttcccggggcgagacc

SEQ ID NO: 67248 - DNA, 20 bp, Artificial Sequence
  chemically synthesized
ttggctgaggttctgtgtcc

SEQ ID NO: 67249 - DNA, 20 bp, Artificial Sequence
  chemically synthesized
agtcagatgtggggttgaat

SEQ ID NO: 67250 - DNA, 20 bp, Artificial Sequence
  chemically synthesized
tggcttcctctcactagctg

SEQ ID NO: 67251 - DNA, 20 bp, Artificial Sequence
  chemically synthesized
caagccccggggggatcact

SEQ ID NO: 67252 - DNA, 20 bp, Artificial Sequence
  chemically synthesized
tgccactcacagctgcctgc

SEQ ID NO: 67253 - DNA, 20 bp, Artificial Sequence
  chemically synthesized
cacctgaaccaagcccttga

SEQ ID NO: 67254 - DNA, 20 bp, Artificial Sequence
  chemically synthesized
gaggatgtttcttctctggt

SEQ ID NO: 67255 - DNA, 20 bp, Artificial Sequence
  chemically synthesized
tcaccccaggtgcattagaa

SEQ ID NO: 67256 - DNA, 20 bp, Artificial Sequence
  chemically synthesized
ggtgtcatgagaattttatt

SEQ ID NO: 67257 - DNA, 20 bp, Artificial Sequence
  chemically synthesized
tttttcttttttttttgaga

SEQ ID NO: 67258 - DNA, 20 bp, Artificial Sequence
  chemically synthesized
tgcctcagcctcccaagaag

SEQ ID NO: 67259 - DNA, 20 bp, Artificial Sequence
  chemically synthesized
ttttgtatttttagtagaga

SEQ ID NO: 67260 - DNA, 20 bp, Artificial Sequence
  chemically synthesized
tgtaaaatgttacgaaaacc

SEQ ID NO: 67261 - DNA, 20 bp, Artificial Sequence
  chemically synthesized
acgaaaaccaaaagtttttt

SEQ ID NO: 67262 - DNA, 20 bp, Artificial Sequence
  chemically synthesized
agcacctgacgtgaactgac

SEQ ID NO: 67263 - DNA, 20 bp, Artificial Sequence
  chemically synthesized
catattcatatattttgctg

SEQ ID NO: 67264 - DNA, 20 bp, Artificial Sequence
  chemically synthesized
catagattacagtatgcagc

SEQ ID NO: 67265 - DNA, 20 bp, Artificial Sequence
  chemically synthesized
tccagattcttccaagcaga

SEQ ID NO: 67266 - DNA, 20 bp, Artificial Sequence
  chemically synthesized
aaacaagttctgaggttcaa

SEQ ID NO: 67267 - DNA, 20 bp, Artificial Sequence
  chemically synthesized
gttcaaaaccgttttggccc

SEQ ID NO: 67268 - DNA, 20 bp, Artificial Sequence
  chemically synthesized
gtaggggccaaggaggagca

SEQ ID NO: 67269 - DNA, 20 bp, Artificial Sequence
  chemically synthesized
aggaggagcatggagtttgg

SEQ ID NO: 67270 - DNA, 20 bp, Artificial Sequence
  chemically synthesized
catagatagtggctgctata

SEQ ID NO: 67271 - DNA, 20 bp, Artificial Sequence
  chemically synthesized
tggaagtggggcctaatggg

SEQ ID NO: 67272 - DNA, 20 bp, Artificial Sequence
  chemically synthesized
atgggggaggaacccctgtg

SEQ ID NO: 67273 - DNA, 20 bp, Artificial Sequence
  chemically synthesized
ataatgagtaagttctcccg

SEQ ID NO: 67274 - DNA, 20 bp, Artificial Sequence
  chemically synthesized
ccgctatgatttcccttgaa

SEQ ID NO: 67275 - DNA, 20 bp, Artificial Sequence
  chemically synthesized
cttgaaggctgattattaaa

SEQ ID NO: 67276 - DNA, 20 bp, Artificial Sequence
  chemically synthesized
tggcacctccctctcttctc

SEQ ID NO: 67277 - DNA, 20 bp, Artificial Sequence
  chemically synthesized
ctcttgcttcttctcttgcc

SEQ ID NO: 67278 - DNA, 20 bp, Artificial Sequence
  chemically synthesized
caccttctgccatcagtgaa

SEQ ID NO: 67279 - DNA, 20 bp, Artificial Sequence
  chemically synthesized
accagaagcagatgctggtg

SEQ ID NO: 67280 - DNA, 20 bp, Artificial Sequence
  chemically synthesized
tgctggtgccatgcttcctg

SEQ ID NO: 67281 - DNA, 20 bp, Artificial Sequence
  chemically synthesized
catttgtagagcatctggat

SEQ ID NO: 67282 - DNA, 20 bp, Artificial Sequence
  chemically synthesized
ttggagctggaattcaggtc

SEQ ID NO: 67283 - DNA, 20 bp, Artificial Sequence
  chemically synthesized
cggtttcctggctccaaagc

SEQ ID NO: 67284 - DNA, 20 bp, Artificial Sequence
  chemically synthesized
tggcctatatgagttcttta

SEQ ID NO: 67285 - DNA, 20 bp, Artificial Sequence
  chemically synthesized
ggggtgagataaagtacacc

SEQ ID NO: 67286 - DNA, 20 bp, Artificial Sequence
  chemically synthesized
taaagtacacctagggtttg

SEQ ID NO: 67287 - DNA, 20 bp, Artificial Sequence
  chemically synthesized
atgtcttccatggccttctt

SEQ ID NO: 67288 - DNA, 20 bp, Artificial Sequence
  chemically synthesized
cactgcatatacactgggga

SEQ ID NO: 67289 - DNA, 20 bp, Artificial Sequence
  chemically synthesized
gggtaccaagcacagtaact

SEQ ID NO: 67290 - DNA, 20 bp, Artificial Sequence
  chemically synthesized
tattctcctcaccctggccc

SEQ ID NO: 67291 - DNA, 20 bp, Artificial Sequence
  chemically synthesized
tagtgcttcaaatcttaaaa

SEQ ID NO: 67292 - DNA, 20 bp, Artificial Sequence
  chemically synthesized
tcttaaaaaaacgtttttat

SEQ ID NO: 67293 - DNA, 20 bp, Artificial Sequence
  chemically synthesized
tggtgcagaagcacaaataa

SEQ ID NO: 67294 - DNA, 20 bp, Artificial Sequence
  chemically synthesized
gcacaaataaaaacgttttt

SEQ ID NO: 67295 - DNA, 20 bp, Artificial Sequence
  chemically synthesized
gggacttcactctggatagc

SEQ ID NO: 67296 - DNA, 20 bp, Artificial Sequence
  chemically synthesized
aggaattttggaccctagag

SEQ ID NO: 67297 - DNA, 20 bp, Artificial Sequence
  chemically synthesized
catcccagggccttgtccct

SEQ ID NO: 67298 - DNA, 20 bp, Artificial Sequence
  chemically synthesized
aatggctggcaggcagacca

SEQ ID NO: 67299 - DNA, 20 bp, Artificial Sequence
  chemically synthesized
gacgtaccactggggcatgg

SEQ ID NO: 67300 - DNA, 20 bp, Artificial Sequence
  chemically synthesized
atacagaaagccagtagtta

SEQ ID NO: 67301 - DNA, 20 bp, Artificial Sequence
  chemically synthesized
aatacatacttgctgtcccc

SEQ ID NO: 67302 - DNA, 20 bp, Artificial Sequence
  chemically synthesized
actacgggccacactcgaca

SEQ ID NO: 67303 - DNA, 20 bp, Artificial Sequence
  chemically synthesized
ataaattgagggaaaaaatc

SEQ ID NO: 67304 - DNA, 20 bp, Artificial Sequence
  chemically synthesized
ggtgagtaatttacaaggaa

SEQ ID NO: 67305 - DNA, 20 bp, Artificial Sequence
  chemically synthesized
ggaaaagggatttattcagc

SEQ ID NO: 67306 - DNA, 20 bp, Artificial Sequence
  chemically synthesized
ccaggaagcatggcaccagc

SEQ ID NO: 67307 - DNA, 20 bp, Artificial Sequence
  chemically synthesized
tgcttctggtgagggcctta

SEQ ID NO: 67308 - DNA, 20 bp, Artificial Sequence
  chemically synthesized
actgaggaccaaatttccac

SEQ ID NO: 67309 - DNA, 20 bp, Artificial Sequence
  chemically synthesized
attatagcagccactatcta

SEQ ID NO: 67310 - DNA, 20 bp, Artificial Sequence
  chemically synthesized
agcagccactatctatggtg

SEQ ID NO: 67311 - DNA, 20 bp, Artificial Sequence
  chemically synthesized
ccactatctatggtgatttg

SEQ ID NO: 67312 - DNA, 20 bp, Artificial Sequence
  chemically synthesized
aactgctctcaggcagacat

SEQ ID NO: 67313 - DNA, 20 bp, Artificial Sequence
  chemically synthesized
acccaaagccttagggccaa

SEQ ID NO: 67314 - DNA, 20 bp, Artificial Sequence
  chemically synthesized
aaacggttttgaacctcaga

SEQ ID NO: 67315 - DNA, 20 bp, Artificial Sequence
  chemically synthesized
gttttgaacctcagaacttg

SEQ ID NO: 67316 - DNA, 20 bp, Artificial Sequence
  chemically synthesized
ggcagtaatgggcaatcaga

SEQ ID NO: 67317 - DNA, 20 bp, Artificial Sequence
  chemically synthesized
aataaatcacaaaaaaaact

SEQ ID NO: 67318 - DNA, 20 bp, Artificial Sequence
  chemically synthesized
tcggatccactgaggaggtc

SEQ ID NO: 67319 - DNA, 20 bp, Artificial Sequence
  chemically synthesized
tggtggcaggtacctgtaat

SEQ ID NO: 67320 - DNA, 20 bp, Artificial Sequence
  chemically synthesized
tgtgctccttatcttccacc

SEQ ID NO: 67321 - DNA, 20 bp, Artificial Sequence
  chemically synthesized
catcatcgctgaactcctac

SEQ ID NO: 67322 - DNA, 20 bp, Artificial Sequence
  chemically synthesized
gtgacctcctctctctgggc

SEQ ID NO: 67323 - DNA, 20 bp, Artificial Sequence
  chemically synthesized
agtttctcatgactaaaaga

SEQ ID NO: 67324 - DNA, 20 bp, Artificial Sequence
  chemically synthesized
ggattggtctaaaaattatt

SEQ ID NO: 67325 - DNA, 20 bp, Artificial Sequence
  chemically synthesized
aaaaaatattttcattctaa

SEQ ID NO: 67326 - DNA, 20 bp, Artificial Sequence
  chemically synthesized
accagagaagaaacatcctc

SEQ ID NO: 67327 - DNA, 20 bp, Artificial Sequence
  chemically synthesized
ggttcaggtggtcatacagc

SEQ ID NO: 67328 - DNA, 20 bp, Artificial Sequence
  chemically synthesized
gtactcactatttccagaac

SEQ ID NO: 67329 - DNA, 20 bp, Artificial Sequence
  chemically synthesized
ttcccctctgccccaggagc

SEQ ID NO: 67330 - DNA, 20 bp, Artificial Sequence
  chemically synthesized
aaaactgcaagtgatccccc

SEQ ID NO: 67331 - DNA, 20 bp, Artificial Sequence
  chemically synthesized
ctgctgccactgagccgtag

SEQ ID NO: 67332 - DNA, 20 bp, Artificial Sequence
  chemically synthesized
gacgattgtcacctcccttt

SEQ ID NO: 67333 - DNA, 20 bp, Artificial Sequence
  chemically synthesized
ccacagctagtgagaggaag

SEQ ID NO: 67334 - DNA, 20 bp, Artificial Sequence
  chemically synthesized
ctagtggtctcgccccggga

SEQ ID NO: 67335 - DNA, 20 bp, Artificial Sequence
  chemically synthesized
ggccctccaccctccgctgc

SEQ ID NO: 67336 - DNA, 20 bp, Artificial Sequence
  chemically synthesized
ggaacccactataatggcaa

SEQ ID NO: 67337 - DNA, 20 bp, Artificial Sequence
  chemically synthesized
gtggctgtggttccgtgctc

SEQ ID NO: 67338 - DNA, 20 bp, Artificial Sequence
  chemically synthesized
gcggaaaccttctagggtgt

SEQ ID NO: 67339 - DNA, 20 bp, Artificial Sequence
  chemically synthesized
gagccccatcggacgatcct

SEQ ID NO: 67340 - DNA, 20 bp, Artificial Sequence
  chemically synthesized
ggaacccccggactggagga

SEQ ID NO: 67341 - DNA, 20 bp, Artificial Sequence
  chemically synthesized
cctcgccctccccaaacagc

SEQ ID NO: 67342 - DNA, 20 bp, Artificial Sequence
  chemically synthesized
ttctgccgggcccacctttt

SEQ ID NO: 67343 - DNA, 20 bp, Artificial Sequence
  chemically synthesized
taccaactagctgctccttg

SEQ ID NO: 67344 - DNA, 20 bp, Artificial Sequence
  chemically synthesized
aactagctgctccttgaaga

SEQ ID NO: 67345 - DNA, 20 bp, Artificial Sequence
  chemically synthesized
agctgctccttgaagagatt

SEQ ID NO: 67346 - DNA, 20 bp, Artificial Sequence
  chemically synthesized
gtccagcctacatgcatttc

SEQ ID NO: 67347 - DNA, 20 bp, Artificial Sequence
  chemically synthesized
atttcaagggatttatacta

SEQ ID NO: 67348 - DNA, 20 bp, Artificial Sequence
  chemically synthesized
gggatttatactacaaagat

SEQ ID NO: 67349 - DNA, 20 bp, Artificial Sequence
  chemically synthesized
atactacaaagattcaggtt

SEQ ID NO: 67350 - DNA, 20 bp, Artificial Sequence
  chemically synthesized
aattctatggtaggcacaag

SEQ ID NO: 67351 - DNA, 20 bp, Artificial Sequence
  chemically synthesized
aggcacaagctcagctttcc

SEQ ID NO: 67352 - DNA, 20 bp, Artificial Sequence
  chemically synthesized
tttccagaagattcaatttg

SEQ ID NO: 67353 - DNA, 20 bp, Artificial Sequence
  chemically synthesized
ggggaaagagagctcctggc

SEQ ID NO: 67354 - DNA, 20 bp, Artificial Sequence
  chemically synthesized
attgtacatgtggcatgaca

SEQ ID NO: 67355 - DNA, 20 bp, Artificial Sequence
  chemically synthesized
atcctcccttgcagatgcac

SEQ ID NO: 67356 - DNA, 20 bp, Artificial Sequence
  chemically synthesized
caaagttgatgctctttcca

SEQ ID NO: 67357 - DNA, 20 bp, Artificial Sequence
  chemically synthesized
cgcagcacagagtaggagct

SEQ ID NO: 67358 - DNA, 20 bp, Artificial Sequence
  chemically synthesized
taattggaattgtatttgca

SEQ ID NO: 67359 - DNA, 20 bp, Artificial Sequence
  chemically synthesized
tgtatttgcaatgtgctttt

SEQ ID NO: 67360 - DNA, 22 bp, Artificial Sequence
  chemically synthesized
gctcccatctattcttgctcca

SEQ ID NO: 67361 - DNA, 22 bp, Artificial Sequence
  chemically synthesized
ccatctattcttgctccagggg

SEQ ID NO: 67362 - DNA, 22 bp, Artificial Sequence
  chemically synthesized
ttcttgctccaggggaggcctt

SEQ ID NO: 67363 - DNA, 22 bp, Artificial Sequence
  chemically synthesized
ttgctccaggggaggcctttga

SEQ ID NO: 67364 - DNA, 22 bp, Artificial Sequence
  chemically synthesized
gctccaggggaggcctttgatg

SEQ ID NO: 67365 - DNA, 22 bp, Artificial Sequence
  chemically synthesized
ctccaggggaggcctttgatga

SEQ ID NO: 67366 - DNA, 22 bp, Artificial Sequence
  chemically synthesized
caggggaggcctttgatgagga

SEQ ID NO: 67367 - DNA, 22 bp, Artificial Sequence
  chemically synthesized
tgatgaggaagctgccaaaagc

SEQ ID NO: 67368 - DNA, 22 bp, Artificial Sequence
  chemically synthesized
gatgaggaagctgccaaaagca

SEQ ID NO: 67369 - DNA, 22 bp, Artificial Sequence
  chemically synthesized
atgaggaagctgccaaaagcac

SEQ ID NO: 67370 - DNA, 22 bp, Artificial Sequence
  chemically synthesized
ccaaaagcacattgcaaataca

SEQ ID NO: 67371 - DNA, 22 bp, Artificial Sequence
  chemically synthesized
caaatacaattccaattacagg

SEQ ID NO: 67372 - DNA, 22 bp, Artificial Sequence
  chemically synthesized
caattacaggcaacaggaagga

SEQ ID NO: 67373 - DNA, 22 bp, Artificial Sequence
  chemically synthesized
caggcaacaggaaggagaacca

SEQ ID NO: 67374 - DNA, 22 bp, Artificial Sequence
  chemically synthesized
tgccacctctgtcagcaaacca

SEQ ID NO: 67375 - DNA, 22 bp, Artificial Sequence
  chemically synthesized
ccacctctgtcagcaaaccatg

SEQ ID NO: 67376 - DNA, 22 bp, Artificial Sequence
  chemically synthesized
tgtcagcaaaccatgagctcct

SEQ ID NO: 67377 - DNA, 22 bp, Artificial Sequence
  chemically synthesized
tcagcaaaccatgagctcctac

SEQ ID NO: 67378 - DNA, 22 bp, Artificial Sequence
  chemically synthesized
ctactctgtgctgcgatggcgg

SEQ ID NO: 67379 - DNA, 22 bp, Artificial Sequence
  chemically synthesized
ctctgtgctgcgatggcgggct

SEQ ID NO: 67380 - DNA, 22 bp, Artificial Sequence
  chemically synthesized
tgtgctgcgatggcgggctcga

SEQ ID NO: 67381 - DNA, 22 bp, Artificial Sequence
  chemically synthesized
tgctgcgatggcgggctcgatg

SEQ ID NO: 67382 - DNA, 22 bp, Artificial Sequence
  chemically synthesized
cgatggcgggctcgatggggat

SEQ ID NO: 67383 - DNA, 22 bp, Artificial Sequence
  chemically synthesized
gatggggataactctgacctta

SEQ ID NO: 67384 - DNA, 22 bp, Artificial Sequence
  chemically synthesized
tgaccttacctcatggagtcac

SEQ ID NO: 67385 - DNA, 22 bp, Artificial Sequence
  chemically synthesized
accttacctcatggagtcactg

SEQ ID NO: 67386 - DNA, 22 bp, Artificial Sequence
  chemically synthesized
acctcatggagtcactgtcaac

SEQ ID NO: 67387 - DNA, 22 bp, Artificial Sequence
  chemically synthesized
cctcatggagtcactgtcaacc

SEQ ID NO: 67388 - DNA, 22 bp, Artificial Sequence
  chemically synthesized
atggagtcactgtcaacccact

SEQ ID NO: 67389 - DNA, 22 bp, Artificial Sequence
  chemically synthesized
tcaacccactggttgcactgtc

SEQ ID NO: 67390 - DNA, 22 bp, Artificial Sequence
  chemically synthesized
gttgcactgtctttgtgcactg

SEQ ID NO: 67391 - DNA, 22 bp, Artificial Sequence
  chemically synthesized
cactgtctttgtgcactggctc

SEQ ID NO: 67392 - DNA, 22 bp, Artificial Sequence
  chemically synthesized
tctttgtgcactggctctctgg

SEQ ID NO: 67393 - DNA, 22 bp, Artificial Sequence
  chemically synthesized
tgtgcactggctctctggagtg

SEQ ID NO: 67394 - DNA, 22 bp, Artificial Sequence
  chemically synthesized
gtgcactggctctctggagtga

SEQ ID NO: 67395 - DNA, 22 bp, Artificial Sequence
  chemically synthesized
tgcactggctctctggagtgag

SEQ ID NO: 67396 - DNA, 22 bp, Artificial Sequence
  chemically synthesized
gctctctggagtgaggtctttg

SEQ ID NO: 67397 - DNA, 22 bp, Artificial Sequence
  chemically synthesized
tctggagtgaggtctttgcaaa

SEQ ID NO: 67398 - DNA, 22 bp, Artificial Sequence
  chemically synthesized
tggagtgaggtctttgcaaaca

SEQ ID NO: 67399 - DNA, 22 bp, Artificial Sequence
  chemically synthesized
gagtgaggtctttgcaaacaaa

SEQ ID NO: 67400 - DNA, 22 bp, Artificial Sequence
  chemically synthesized
tgcaaacaaagtggaaagagca

SEQ ID NO: 67401 - DNA, 22 bp, Artificial Sequence
  chemically synthesized
gcaaacaaagtggaaagagcat

SEQ ID NO: 67402 - DNA, 22 bp, Artificial Sequence
  chemically synthesized
caaacaaagtggaaagagcatc

SEQ ID NO: 67403 - DNA, 22 bp, Artificial Sequence
  chemically synthesized
tggactccagcacctagattca

SEQ ID NO: 67404 - DNA, 22 bp, Artificial Sequence
  chemically synthesized
ggactccagcacctagattcag

SEQ ID NO: 67405 - DNA, 22 bp, Artificial Sequence
  chemically synthesized
gactccagcacctagattcaga

SEQ ID NO: 67406 - DNA, 22 bp, Artificial Sequence
  chemically synthesized
cagcacctagattcagagcagg

SEQ ID NO: 67407 - DNA, 22 bp, Artificial Sequence
  chemically synthesized
gattcagagcaggccatttcac

SEQ ID NO: 67408 - DNA, 22 bp, Artificial Sequence
  chemically synthesized
agagcaggccatttcactcgga

SEQ ID NO: 67409 - DNA, 22 bp, Artificial Sequence
  chemically synthesized
cactcggaatctgctgtgcatc

SEQ ID NO: 67410 - DNA, 22 bp, Artificial Sequence
  chemically synthesized
actcggaatctgctgtgcatct

SEQ ID NO: 67411 - DNA, 22 bp, Artificial Sequence
  chemically synthesized
ggaatctgctgtgcatctgcaa

SEQ ID NO: 67412 - DNA, 22 bp, Artificial Sequence
  chemically synthesized
ctgtgcatctgcaagggaggat

SEQ ID NO: 67413 - DNA, 22 bp, Artificial Sequence
  chemically synthesized
tgcatctgcaagggaggatcat

SEQ ID NO: 67414 - DNA, 22 bp, Artificial Sequence
  chemically synthesized
caagggaggatcataaattcgc

SEQ ID NO: 67415 - DNA, 22 bp, Artificial Sequence
  chemically synthesized
gcctttgtttcttcccagtatc

SEQ ID NO: 67416 - DNA, 22 bp, Artificial Sequence
  chemically synthesized
tgtttcttcccagtatcgacag

SEQ ID NO: 67417 - DNA, 22 bp, Artificial Sequence
  chemically synthesized
gtttcttcccagtatcgacagc

SEQ ID NO: 67418 - DNA, 22 bp, Artificial Sequence
  chemically synthesized
tttcttcccagtatcgacagcc

SEQ ID NO: 67419 - DNA, 22 bp, Artificial Sequence
  chemically synthesized
cttcccagtatcgacagccctt

SEQ ID NO: 67420 - DNA, 22 bp, Artificial Sequence
  chemically synthesized
ttcccagtatcgacagcccttc

SEQ ID NO: 67421 - DNA, 22 bp, Artificial Sequence
  chemically synthesized
cccagtatcgacagcccttcca

SEQ ID NO: 67422 - DNA, 22 bp, Artificial Sequence
  chemically synthesized
ccagtatcgacagcccttccag

SEQ ID NO: 67423 - DNA, 22 bp, Artificial Sequence
  chemically synthesized
ccagaaagagcaagcctcatgt

SEQ ID NO: 67424 - DNA, 22 bp, Artificial Sequence
  chemically synthesized
cagaaagagcaagcctcatgtc

SEQ ID NO: 67425 - DNA, 22 bp, Artificial Sequence
  chemically synthesized
atgtcatgccacatgtacaatc

SEQ ID NO: 67426 - DNA, 22 bp, Artificial Sequence
  chemically synthesized
aggccaggagctctctttcccc

SEQ ID NO: 67427 - DNA, 22 bp, Artificial Sequence
  chemically synthesized
tctttccccttttcatcctcct

SEQ ID NO: 67428 - DNA, 22 bp, Artificial Sequence
  chemically synthesized
tttccccttttcatcctcctgc

SEQ ID NO: 67429 - DNA, 22 bp, Artificial Sequence
  chemically synthesized
tccccttttcatcctcctgcct

SEQ ID NO: 67430 - DNA, 22 bp, Artificial Sequence
  chemically synthesized
ccccttttcatcctcctgcctg

SEQ ID NO: 67431 - DNA, 22 bp, Artificial Sequence
  chemically synthesized
cccttttcatcctcctgcctgg

SEQ ID NO: 67432 - DNA, 22 bp, Artificial Sequence
  chemically synthesized
ttcatcctcctgcctggtacac

SEQ ID NO: 67433 - DNA, 22 bp, Artificial Sequence
  chemically synthesized
tcatcctcctgcctggtacaca

SEQ ID NO: 67434 - DNA, 22 bp, Artificial Sequence
  chemically synthesized
catcctcctgcctggtacacaa

SEQ ID NO: 67435 - DNA, 22 bp, Artificial Sequence
  chemically synthesized
atcctcctgcctggtacacaat

SEQ ID NO: 67436 - DNA, 22 bp, Artificial Sequence
  chemically synthesized
ctgcctggtacacaataggtgt

SEQ ID NO: 67437 - DNA, 22 bp, Artificial Sequence
  chemically synthesized
cctggtacacaataggtgttta

SEQ ID NO: 67438 - DNA, 22 bp, Artificial Sequence
  chemically synthesized
gtacacaataggtgtttactgg

SEQ ID NO: 67439 - DNA, 22 bp, Artificial Sequence
  chemically synthesized
actggatgcttgtccagttgat

SEQ ID NO: 67440 - DNA, 22 bp, Artificial Sequence
  chemically synthesized
ctggatgcttgtccagttgatt

SEQ ID NO: 67441 - DNA, 22 bp, Artificial Sequence
  chemically synthesized
gatgcttgtccagttgatttct

SEQ ID NO: 67442 - DNA, 22 bp, Artificial Sequence
  chemically synthesized
gtccagttgatttcttgaacat

SEQ ID NO: 67443 - DNA, 22 bp, Artificial Sequence
  chemically synthesized
tccagttgatttcttgaacatg

SEQ ID NO: 67444 - DNA, 22 bp, Artificial Sequence
  chemically synthesized
atttcttgaacatggtgtgtaa

SEQ ID NO: 67445 - DNA, 22 bp, Artificial Sequence
  chemically synthesized
cttgaacatggtgtgtaaaagg

SEQ ID NO: 67446 - DNA, 22 bp, Artificial Sequence
  chemically synthesized
ttgaacatggtgtgtaaaagga

SEQ ID NO: 67447 - DNA, 22 bp, Artificial Sequence
  chemically synthesized
gaacatggtgtgtaaaaggaat

SEQ ID NO: 67448 - DNA, 22 bp, Artificial Sequence
  chemically synthesized
aacatggtgtgtaaaaggaatc

SEQ ID NO: 67449 - DNA, 22 bp, Artificial Sequence
  chemically synthesized
tgcaaattgaatcttctggaaa

SEQ ID NO: 67450 - DNA, 22 bp, Artificial Sequence
  chemically synthesized
gcaaattgaatcttctggaaag

SEQ ID NO: 67451 - DNA, 22 bp, Artificial Sequence
  chemically synthesized
caaattgaatcttctggaaagc

SEQ ID NO: 67452 - DNA, 22 bp, Artificial Sequence
  chemically synthesized
aatcttctggaaagctgagctt

SEQ ID NO: 67453 - DNA, 22 bp, Artificial Sequence
  chemically synthesized
ctggaaagctgagcttgtgcct

SEQ ID NO: 67454 - DNA, 22 bp, Artificial Sequence
  chemically synthesized
tggaaagctgagcttgtgccta

SEQ ID NO: 67455 - DNA, 22 bp, Artificial Sequence
  chemically synthesized
gaaagctgagcttgtgcctacc

SEQ ID NO: 67456 - DNA, 22 bp, Artificial Sequence
  chemically synthesized
agcttgtgcctaccatagaatt

SEQ ID NO: 67457 - DNA, 22 bp, Artificial Sequence
  chemically synthesized
gtgcctaccatagaattctgaa

SEQ ID NO: 67458 - DNA, 22 bp, Artificial Sequence
  chemically synthesized
tgcctaccatagaattctgaat

SEQ ID NO: 67459 - DNA, 22 bp, Artificial Sequence
  chemically synthesized
ccatagaattctgaatgtacct

SEQ ID NO: 67460 - DNA, 22 bp, Artificial Sequence
  chemically synthesized
tgaatgtacctatatgacgtct

SEQ ID NO: 67461 - DNA, 22 bp, Artificial Sequence
  chemically synthesized
aatgtacctatatgacgtcttt

SEQ ID NO: 67462 - DNA, 22 bp, Artificial Sequence
  chemically synthesized
tatgacgtctttgcaaacttaa

SEQ ID NO: 67463 - DNA, 22 bp, Artificial Sequence
  chemically synthesized
tgcaaacttaaaacctgaatct

SEQ ID NO: 67464 - DNA, 22 bp, Artificial Sequence
  chemically synthesized
gcaaacttaaaacctgaatctt

SEQ ID NO: 67465 - DNA, 22 bp, Artificial Sequence
  chemically synthesized
caaacttaaaacctgaatcttt

SEQ ID NO: 67466 - DNA, 22 bp, Artificial Sequence
  chemically synthesized
aaaacctgaatctttgtagtat

SEQ ID NO: 67467 - DNA, 22 bp, Artificial Sequence
  chemically synthesized
aaacctgaatctttgtagtata

SEQ ID NO: 67468 - DNA, 22 bp, Artificial Sequence
  chemically synthesized
aatctttgtagtataaatccct

SEQ ID NO: 67469 - DNA, 22 bp, Artificial Sequence
  chemically synthesized
tgtagtataaatcccttgaaat

SEQ ID NO: 67470 - DNA, 22 bp, Artificial Sequence
  chemically synthesized
gtagtataaatcccttgaaatg

SEQ ID NO: 67471 - DNA, 22 bp, Artificial Sequence
  chemically synthesized
tagtataaatcccttgaaatgc

SEQ ID NO: 67472 - DNA, 22 bp, Artificial Sequence
  chemically synthesized
gaaatgcatgtaggctggacat

SEQ ID NO: 67473 - DNA, 22 bp, Artificial Sequence
  chemically synthesized
aaatgcatgtaggctggacatc

SEQ ID NO: 67474 - DNA, 22 bp, Artificial Sequence
  chemically synthesized
gacatcaaaagcaagcaatctc

SEQ ID NO: 67475 - DNA, 22 bp, Artificial Sequence
  chemically synthesized
ttcaaggagcagctagttggta

SEQ ID NO: 67476 - DNA, 22 bp, Artificial Sequence
  chemically synthesized
caaggagcagctagttggtaag

SEQ ID NO: 67477 - DNA, 22 bp, Artificial Sequence
  chemically synthesized
aaggagcagctagttggtaagg

SEQ ID NO: 67478 - DNA, 22 bp, Artificial Sequence
  chemically synthesized
gttggtaaggtcagtgtgcagg

SEQ ID NO: 67479 - DNA, 22 bp, Artificial Sequence
  chemically synthesized
gtaaggtcagtgtgcagggtgc

SEQ ID NO: 67480 - DNA, 22 bp, Artificial Sequence
  chemically synthesized
agtttagaaggctgccaggtta

SEQ ID NO: 67481 - DNA, 22 bp, Artificial Sequence
  chemically synthesized
agaaggctgccaggttaaggcc

SEQ ID NO: 67482 - DNA, 22 bp, Artificial Sequence
  chemically synthesized
gaaggctgccaggttaaggcca

SEQ ID NO: 67483 - DNA, 22 bp, Artificial Sequence
  chemically synthesized
ccaggttaaggccagtggaaag

SEQ ID NO: 67484 - DNA, 22 bp, Artificial Sequence
  chemically synthesized
aggccagtggaaagaattcggt

SEQ ID NO: 67485 - DNA, 22 bp, Artificial Sequence
  chemically synthesized
ggtgggcagcgaggagtccaca

SEQ ID NO: 67486 - DNA, 22 bp, Artificial Sequence
  chemically synthesized
attcagaagtctcactggtcag

SEQ ID NO: 67487 - DNA, 22 bp, Artificial Sequence
  chemically synthesized
agaagtctcactggtcagcagg

SEQ ID NO: 67488 - DNA, 22 bp, Artificial Sequence
  chemically synthesized
actggtcagcaggagacaaggt

SEQ ID NO: 67489 - DNA, 22 bp, Artificial Sequence
  chemically synthesized
gtcagcaggagacaaggtggac

SEQ ID NO: 67490 - DNA, 22 bp, Artificial Sequence
  chemically synthesized
aaaaggtgggcccggcagaact

SEQ ID NO: 67491 - DNA, 22 bp, Artificial Sequence
  chemically synthesized
ggagtctggcatcccacgcagg

SEQ ID NO: 67492 - DNA, 22 bp, Artificial Sequence
  chemically synthesized
gagtctggcatcccacgcaggg

SEQ ID NO: 67493 - DNA, 22 bp, Artificial Sequence
  chemically synthesized
gcatcccacgcagggtgagagg

SEQ ID NO: 67494 - DNA, 22 bp, Artificial Sequence
  chemically synthesized
gggcgccggcctgccttccagc

SEQ ID NO: 67495 - DNA, 22 bp, Artificial Sequence
  chemically synthesized
ccttccagcccagttaggattt

SEQ ID NO: 67496 - DNA, 22 bp, Artificial Sequence
  chemically synthesized
ccagcccagttaggatttggga

SEQ ID NO: 67497 - DNA, 22 bp, Artificial Sequence
  chemically synthesized
cagcccagttaggatttgggag

SEQ ID NO: 67498 - DNA, 22 bp, Artificial Sequence
  chemically synthesized
ggatttgggagttttttcttcc

SEQ ID NO: 67499 - DNA, 22 bp, Artificial Sequence
  chemically synthesized
gggagttttttcttccctctgc

SEQ ID NO: 67500 - DNA, 22 bp, Artificial Sequence
  chemically synthesized
ggagttttttcttccctctgcg

SEQ ID NO: 67501 - DNA, 22 bp, Artificial Sequence
  chemically synthesized
tttcttccctctgcgcgtaatc

SEQ ID NO: 67502 - DNA, 22 bp, Artificial Sequence
  chemically synthesized
ttcttccctctgcgcgtaatct

SEQ ID NO: 67503 - DNA, 22 bp, Artificial Sequence
  chemically synthesized
tcttccctctgcgcgtaatctg

SEQ ID NO: 67504 - DNA, 22 bp, Artificial Sequence
  chemically synthesized
cttccctctgcgcgtaatctga

SEQ ID NO: 67505 - DNA, 22 bp, Artificial Sequence
  chemically synthesized
ttccctctgcgcgtaatctgac

SEQ ID NO: 67506 - DNA, 22 bp, Artificial Sequence
  chemically synthesized
ccctctgcgcgtaatctgacgc

SEQ ID NO: 67507 - DNA, 22 bp, Artificial Sequence
  chemically synthesized
cctctgcgcgtaatctgacgct

SEQ ID NO: 67508 - DNA, 22 bp, Artificial Sequence
  chemically synthesized
tgcgcgtaatctgacgctgttt

SEQ ID NO: 67509 - DNA, 22 bp, Artificial Sequence
  chemically synthesized
cgcgtaatctgacgctgtttgg

SEQ ID NO: 67510 - DNA, 22 bp, Artificial Sequence
  chemically synthesized
acgctgtttggggagggcgagg

SEQ ID NO: 67511 - DNA, 22 bp, Artificial Sequence
  chemically synthesized
tttggggagggcgaggccgaaa

SEQ ID NO: 67512 - DNA, 22 bp, Artificial Sequence
  chemically synthesized
ggggagggcgaggccgaaacct

SEQ ID NO: 67513 - DNA, 22 bp, Artificial Sequence
  chemically synthesized
gggagggcgaggccgaaacctg

SEQ ID NO: 67514 - DNA, 22 bp, Artificial Sequence
  chemically synthesized
atcctccagtccgggggttccg

SEQ ID NO: 67515 - DNA, 22 bp, Artificial Sequence
  chemically synthesized
cagtccgggggttccgttaatg

SEQ ID NO: 67516 - DNA, 22 bp, Artificial Sequence
  chemically synthesized
cgttaatgtttaatcagatagg

SEQ ID NO: 67517 - DNA, 22 bp, Artificial Sequence
  chemically synthesized
atgtttaatcagataggatcgt

SEQ ID NO: 67518 - DNA, 22 bp, Artificial Sequence
  chemically synthesized
aatcagataggatcgtccgatg

SEQ ID NO: 67519 - DNA, 22 bp, Artificial Sequence
  chemically synthesized
atcagataggatcgtccgatgg

SEQ ID NO: 67520 - DNA, 22 bp, Artificial Sequence
  chemically synthesized
tggtggcgtgatctgcgcgccc

SEQ ID NO: 67521 - DNA, 22 bp, Artificial Sequence
  chemically synthesized
gtggcgtgatctgcgcgcccca

SEQ ID NO: 67522 - DNA, 22 bp, Artificial Sequence
  chemically synthesized
cgcgccccaggcgtcaagcacc

SEQ ID NO: 67523 - DNA, 22 bp, Artificial Sequence
  chemically synthesized
gaaggtttccgcagcgacgtcg

SEQ ID NO: 67524 - DNA, 22 bp, Artificial Sequence
  chemically synthesized
ccgcagcgacgtcgaggcgctc

SEQ ID NO: 67525 - DNA, 22 bp, Artificial Sequence
  chemically synthesized
cgcagcgacgtcgaggcgctca

SEQ ID NO: 67526 - DNA, 22 bp, Artificial Sequence
  chemically synthesized
atggttgcaggcgggcgccgcc

SEQ ID NO: 67527 - DNA, 22 bp, Artificial Sequence
  chemically synthesized
caggcgggcgccgccgttcagt

SEQ ID NO: 67528 - DNA, 22 bp, Artificial Sequence
  chemically synthesized
agttcagggtctgagcctggag

SEQ ID NO: 67529 - DNA, 22 bp, Artificial Sequence
  chemically synthesized
agggtctgagcctggaggagtg

SEQ ID NO: 67530 - DNA, 22 bp, Artificial Sequence
  chemically synthesized
agcctggaggagtgagccaggc

SEQ ID NO: 67531 - DNA, 22 bp, Artificial Sequence
  chemically synthesized
gaggagtgagccaggcagtgag

SEQ ID NO: 67532 - DNA, 22 bp, Artificial Sequence
  chemically synthesized
gctcgggcgggccgggacgcgt

SEQ ID NO: 67533 - DNA, 22 bp, Artificial Sequence
  chemically synthesized
gggcgggccgggacgcgtcgtt

SEQ ID NO: 67534 - DNA, 22 bp, Artificial Sequence
  chemically synthesized
cagcagcggctcccagctccca

SEQ ID NO: 67535 - DNA, 22 bp, Artificial Sequence
  chemically synthesized
ccagctcccagccaggattccg

SEQ ID NO: 67536 - DNA, 22 bp, Artificial Sequence
  chemically synthesized
ccagccaggattccgcgcgccc

SEQ ID NO: 67537 - DNA, 22 bp, Artificial Sequence
  chemically synthesized
cgcgcgccccttcacgcgccct

SEQ ID NO: 67538 - DNA, 22 bp, Artificial Sequence
  chemically synthesized
cacgcgccctgctcctgaactt

SEQ ID NO: 67539 - DNA, 22 bp, Artificial Sequence
  chemically synthesized
acgcgccctgctcctgaacttc

SEQ ID NO: 67540 - DNA, 22 bp, Artificial Sequence
  chemically synthesized
ctcctgaacttcagctcctgca

SEQ ID NO: 67541 - DNA, 22 bp, Artificial Sequence
  chemically synthesized
ctgaacttcagctcctgcacag

SEQ ID NO: 67542 - DNA, 22 bp, Artificial Sequence
  chemically synthesized
aacttcagctcctgcacagtcc

SEQ ID NO: 67543 - DNA, 22 bp, Artificial Sequence
  chemically synthesized
cagctcctgcacagtcctcccc

SEQ ID NO: 67544 - DNA, 22 bp, Artificial Sequence
  chemically synthesized
agctcctgcacagtcctcccca

SEQ ID NO: 67545 - DNA, 22 bp, Artificial Sequence
  chemically synthesized
ctgcacagtcctccccaccgca

SEQ ID NO: 67546 - DNA, 22 bp, Artificial Sequence
  chemically synthesized
cacagtcctccccaccgcaagg

SEQ ID NO: 67547 - DNA, 22 bp, Artificial Sequence
  chemically synthesized
cccaccgcaaggctcaaggcgc

SEQ ID NO: 67548 - DNA, 22 bp, Artificial Sequence
  chemically synthesized
aaggcgccgccggcgtggaccg

SEQ ID NO: 67549 - DNA, 22 bp, Artificial Sequence
  chemically synthesized
taggtctcctcgccaggacagc

SEQ ID NO: 67550 - DNA, 22 bp, Artificial Sequence
  chemically synthesized
ggtctcctcgccaggacagcaa

SEQ ID NO: 67551 - DNA, 22 bp, Artificial Sequence
  chemically synthesized
ctcgccaggacagcaacctctc

SEQ ID NO: 67552 - DNA, 22 bp, Artificial Sequence
  chemically synthesized
gccaggacagcaacctctcccc

SEQ ID NO: 67553 - DNA, 22 bp, Artificial Sequence
  chemically synthesized
tcccctggccctcatgggcacc

SEQ ID NO: 67554 - DNA, 22 bp, Artificial Sequence
  chemically synthesized
ccctggccctcatgggcaccgt

SEQ ID NO: 67555 - DNA, 22 bp, Artificial Sequence
  chemically synthesized
gccctcatgggcaccgtcagct

SEQ ID NO: 67556 - DNA, 22 bp, Artificial Sequence
  chemically synthesized
atgggcaccgtcagctccaggc

SEQ ID NO: 67557 - DNA, 22 bp, Artificial Sequence
  chemically synthesized
caggcggtcctggtggccgctg

SEQ ID NO: 67558 - DNA, 22 bp, Artificial Sequence
  chemically synthesized
gtggccgctgccactgctgctg

SEQ ID NO: 67559 - DNA, 22 bp, Artificial Sequence
  chemically synthesized
ccactgctgctgctgctgctgc

SEQ ID NO: 67560 - DNA, 22 bp, Artificial Sequence
  chemically synthesized
ctgctgctgctgctgctgctcc

SEQ ID NO: 67561 - DNA, 22 bp, Artificial Sequence
  chemically synthesized
ctgctgctgctgctgctcctgg

SEQ ID NO: 67562 - DNA, 22 bp, Artificial Sequence
  chemically synthesized
ctgctgctgctgctcctgggtc

SEQ ID NO: 67563 - DNA, 22 bp, Artificial Sequence
  chemically synthesized
ctgctgctgctcctgggtcccg

SEQ ID NO: 67564 - DNA, 22 bp, Artificial Sequence
  chemically synthesized
ctgctgctcctgggtcccgcgg

SEQ ID NO: 67565 - DNA, 22 bp, Artificial Sequence
  chemically synthesized
ctgctcctgggtcccgcgggcg

SEQ ID NO: 67566 - DNA, 22 bp, Artificial Sequence
  chemically synthesized
ctcctgggtcccgcgggcgccc

SEQ ID NO: 67567 - DNA, 22 bp, Artificial Sequence
  chemically synthesized
ctgggtcccgcgggcgcccgtg

SEQ ID NO: 67568 - DNA, 22 bp, Artificial Sequence
  chemically synthesized
ggtcccgcgggcgcccgtgcgc

SEQ ID NO: 67569 - DNA, 22 bp, Artificial Sequence
  chemically synthesized
cgaggagctggtgctagccttg

SEQ ID NO: 67570 - DNA, 22 bp, Artificial Sequence
  chemically synthesized
gtgctagccttgcgttccgagg

SEQ ID NO: 67571 - DNA, 22 bp, Artificial Sequence
  chemically synthesized
gccttgcgttccgaggaggacg

SEQ ID NO: 67572 - DNA, 22 bp, Artificial Sequence
  chemically synthesized
gcgttccgaggaggacggcctg

SEQ ID NO: 67573 - DNA, 22 bp, Artificial Sequence
  chemically synthesized
cgttccgaggaggacggcctgg

SEQ ID NO: 67574 - DNA, 22 bp, Artificial Sequence
  chemically synthesized
cgaggaggacggcctggccgaa

SEQ ID NO: 67575 - DNA, 22 bp, Artificial Sequence
  chemically synthesized
gccgaagcacccgagcacggaa

SEQ ID NO: 67576 - DNA, 22 bp, Artificial Sequence
  chemically synthesized
ccaccgctgcgccaaggtgcgg

SEQ ID NO: 67577 - DNA, 22 bp, Artificial Sequence
  chemically synthesized
caccgctgcgccaaggtgcggg

SEQ ID NO: 67578 - DNA, 22 bp, Artificial Sequence
  chemically synthesized
cgccaaggtgcgggtgtaggga

SEQ ID NO: 67579 - DNA, 22 bp, Artificial Sequence
  chemically synthesized
tttcctctcgggcctcagtttc

SEQ ID NO: 67580 - DNA, 22 bp, Artificial Sequence
  chemically synthesized
cctctcgggcctcagtttcccc

SEQ ID NO: 67581 - DNA, 22 bp, Artificial Sequence
  chemically synthesized
ctctcgggcctcagtttccccc

SEQ ID NO: 67582 - DNA, 22 bp, Artificial Sequence
  chemically synthesized
tcgggcctcagtttccccccat

SEQ ID NO: 67583 - DNA, 22 bp, Artificial Sequence
  chemically synthesized
gggcctcagtttccccccatgt

SEQ ID NO: 67584 - DNA, 22 bp, Artificial Sequence
  chemically synthesized
agtttccccccatgtaagagag

SEQ ID NO: 67585 - DNA, 22 bp, Artificial Sequence
  chemically synthesized
ccccccatgtaagagaggaagt

SEQ ID NO: 67586 - DNA, 22 bp, Artificial Sequence
  chemically synthesized
cccccatgtaagagaggaagtg

SEQ ID NO: 67587 - DNA, 22 bp, Artificial Sequence
  chemically synthesized
ttcgcttggcacgatcttgggg

SEQ ID NO: 67588 - DNA, 22 bp, Artificial Sequence
  chemically synthesized
cgcttggcacgatcttggggac

SEQ ID NO: 67589 - DNA, 22 bp, Artificial Sequence
  chemically synthesized
gcttggcacgatcttggggact

SEQ ID NO: 67590 - DNA, 22 bp, Artificial Sequence
  chemically synthesized
ggcacgatcttggggactgcag

SEQ ID NO: 67591 - DNA, 22 bp, Artificial Sequence
  chemically synthesized
gcacgatcttggggactgcagg

SEQ ID NO: 67592 - DNA, 22 bp, Artificial Sequence
  chemically synthesized
ggggactgcaggcaaggcggcg

SEQ ID NO: 67593 - DNA, 22 bp, Artificial Sequence
  chemically synthesized
gggactgcaggcaaggcggcgg

SEQ ID NO: 67594 - DNA, 22 bp, Artificial Sequence
  chemically synthesized
caggcaaggcggcgggggagga

SEQ ID NO: 67595 - DNA, 22 bp, Artificial Sequence
  chemically synthesized
tttggggacttgctggggcgtg

SEQ ID NO: 67596 - DNA, 22 bp, Artificial Sequence
  chemically synthesized
tggggacttgctggggcgtgcg

SEQ ID NO: 67597 - DNA, 22 bp, Artificial Sequence
  chemically synthesized
ggggacttgctggggcgtgcgg

SEQ ID NO: 67598 - DNA, 22 bp, Artificial Sequence
  chemically synthesized
gggacttgctggggcgtgcggc

SEQ ID NO: 67599 - DNA, 22 bp, Artificial Sequence
  chemically synthesized
gctggggcgtgcggctgcgcta

SEQ ID NO: 67600 - DNA, 22 bp, Artificial Sequence
  chemically synthesized
ctggggcgtgcggctgcgctat

SEQ ID NO: 67601 - DNA, 22 bp, Artificial Sequence
  chemically synthesized
gggcgtgcggctgcgctattca

SEQ ID NO: 67602 - DNA, 22 bp, Artificial Sequence
  chemically synthesized
cgctattcagtgggaaggttcg

SEQ ID NO: 67603 - DNA, 22 bp, Artificial Sequence
  chemically synthesized
ttcagtgggaaggttcgcgggg

SEQ ID NO: 67604 - DNA, 22 bp, Artificial Sequence
  chemically synthesized
agtgggaaggttcgcggggttg

SEQ ID NO: 67605 - DNA, 22 bp, Artificial Sequence
  chemically synthesized
gcggggttgggagacccggagg

SEQ ID NO: 67606 - DNA, 22 bp, Artificial Sequence
  chemically synthesized
ggagacccggaggccgaggaag

SEQ ID NO: 67607 - DNA, 22 bp, Artificial Sequence
  chemically synthesized
ccaggatatcctgcccagattt

SEQ ID NO: 67608 - DNA, 22 bp, Artificial Sequence
  chemically synthesized
cccagatttcccagtttctgcc

SEQ ID NO: 67609 - DNA, 22 bp, Artificial Sequence
  chemically synthesized
cccagtttctgcctcgccgcgg

SEQ ID NO: 67610 - DNA, 22 bp, Artificial Sequence
  chemically synthesized
ccagtttctgcctcgccgcggc

SEQ ID NO: 67611 - DNA, 22 bp, Artificial Sequence
  chemically synthesized
ctgcctcgccgcggcacaggtg

SEQ ID NO: 67612 - DNA, 22 bp, Artificial Sequence
  chemically synthesized
tgcctcgccgcggcacaggtgg

SEQ ID NO: 67613 - DNA, 22 bp, Artificial Sequence
  chemically synthesized
cctcgccgcggcacaggtgggt

SEQ ID NO: 67614 - DNA, 22 bp, Artificial Sequence
  chemically synthesized
gccgcggcacaggtgggtgaag

SEQ ID NO: 67615 - DNA, 22 bp, Artificial Sequence
  chemically synthesized
gaacgtactgggaactgcacca

SEQ ID NO: 67616 - DNA, 22 bp, Artificial Sequence
  chemically synthesized
ggaactgcaccaggcacagaga

SEQ ID NO: 67617 - DNA, 22 bp, Artificial Sequence
  chemically synthesized
caccaggcacagagaaagcggg

SEQ ID NO: 67618 - DNA, 22 bp, Artificial Sequence
  chemically synthesized
gccattatagtgggttccgatt

SEQ ID NO: 67619 - DNA, 22 bp, Artificial Sequence
  chemically synthesized
ccattatagtgggttccgattt

SEQ ID NO: 67620 - DNA, 22 bp, Artificial Sequence
  chemically synthesized
tagtgggttccgatttggtttg

SEQ ID NO: 67621 - DNA, 22 bp, Artificial Sequence
  chemically synthesized
cgatttggtttggaaaacatgg

SEQ ID NO: 67622 - DNA, 22 bp, Artificial Sequence
  chemically synthesized
ggtttggaaaacatgggcagcg

SEQ ID NO: 67623 - DNA, 22 bp, Artificial Sequence
  chemically synthesized
gtttggaaaacatgggcagcgg

SEQ ID NO: 67624 - DNA, 22 bp, Artificial Sequence
  chemically synthesized
ggaaaacatgggcagcggaggg

SEQ ID NO: 67625 - DNA, 22 bp, Artificial Sequence
  chemically synthesized
gaaaacatgggcagcggagggt

SEQ ID NO: 67626 - DNA, 22 bp, Artificial Sequence
  chemically synthesized
gagagaaggccctacccgagac

SEQ ID NO: 67627 - DNA, 22 bp, Artificial Sequence
  chemically synthesized
cccgagacaggggcggggtggg

SEQ ID NO: 67628 - DNA, 22 bp, Artificial Sequence
  chemically synthesized
ggagcacgaggcaatttcttta

SEQ ID NO: 67629 - DNA, 22 bp, Artificial Sequence
  chemically synthesized
ctttatgacacagaactcatgc

SEQ ID NO: 67630 - DNA, 22 bp, Artificial Sequence
  chemically synthesized
tttatgacacagaactcatgct

SEQ ID NO: 67631 - DNA, 22 bp, Artificial Sequence
  chemically synthesized
tatgacacagaactcatgctct

SEQ ID NO: 67632 - DNA, 22 bp, Artificial Sequence
  chemically synthesized
atgacacagaactcatgctcta

SEQ ID NO: 67633 - DNA, 22 bp, Artificial Sequence
  chemically synthesized
tgacacagaactcatgctctag

SEQ ID NO: 67634 - DNA, 22 bp, Artificial Sequence
  chemically synthesized
atgctctagtattccatctgtt

SEQ ID NO: 67635 - DNA, 22 bp, Artificial Sequence
  chemically synthesized
tagtattccatctgtttcagcc

SEQ ID NO: 67636 - DNA, 22 bp, Artificial Sequence
  chemically synthesized
gtattccatctgtttcagccga

SEQ ID NO: 67637 - DNA, 22 bp, Artificial Sequence
  chemically synthesized
catctgtttcagccgaagaaaa

SEQ ID NO: 67638 - DNA, 22 bp, Artificial Sequence
  chemically synthesized
tttcagccgaagaaaagaacca

SEQ ID NO: 67639 - DNA, 22 bp, Artificial Sequence
  chemically synthesized
cagccgaagaaaagaaccagct

SEQ ID NO: 67640 - DNA, 22 bp, Artificial Sequence
  chemically synthesized
agccgaagaaaagaaccagctg

SEQ ID NO: 67641 - DNA, 22 bp, Artificial Sequence
  chemically synthesized
aaggggcaggggagaaggggcg

SEQ ID NO: 67642 - DNA, 22 bp, Artificial Sequence
  chemically synthesized
tcgaggcccattggcgtccttt

SEQ ID NO: 67643 - DNA, 22 bp, Artificial Sequence
  chemically synthesized
gaggcccattggcgtcctttag

SEQ ID NO: 67644 - DNA, 22 bp, Artificial Sequence
  chemically synthesized
gcgtcctttaggactcaggcag

SEQ ID NO: 67645 - DNA, 22 bp, Artificial Sequence
  chemically synthesized
taggactcaggcagggaagggc

SEQ ID NO: 67646 - DNA, 22 bp, Artificial Sequence
  chemically synthesized
aggactcaggcagggaagggcc

SEQ ID NO: 67647 - DNA, 22 bp, Artificial Sequence
  chemically synthesized
ggactcaggcagggaagggccc

SEQ ID NO: 67648 - DNA, 22 bp, Artificial Sequence
  chemically synthesized
aggcagggaagggcccttggtg

SEQ ID NO: 67649 - DNA, 22 bp, Artificial Sequence
  chemically synthesized
ggtgctctggagccggaggtgg

SEQ ID NO: 67650 - DNA, 22 bp, Artificial Sequence
  chemically synthesized
gtgctctggagccggaggtggt

SEQ ID NO: 67651 - DNA, 22 bp, Artificial Sequence
  chemically synthesized
tggagccggaggtggtgcgcct

SEQ ID NO: 67652 - DNA, 22 bp, Artificial Sequence
  chemically synthesized
gagccggaggtggtgcgcctgg

SEQ ID NO: 67653 - DNA, 22 bp, Artificial Sequence
  chemically synthesized
gtactgggaccccggagctgag

SEQ ID NO: 67654 - DNA, 22 bp, Artificial Sequence
  chemically synthesized
ggaccccggagctgagcccggc

SEQ ID NO: 67655 - DNA, 22 bp, Artificial Sequence
  chemically synthesized
agcccggcgcctcagcccacct

SEQ ID NO: 67656 - DNA, 22 bp, Artificial Sequence
  chemically synthesized
agcccacctggctgtctgccga

SEQ ID NO: 67657 - DNA, 22 bp, Artificial Sequence
  chemically synthesized
gctgtctgccgaccgtgtgcgg

SEQ ID NO: 67658 - DNA, 22 bp, Artificial Sequence
  chemically synthesized
tctgccgaccgtgtgcggggcg

SEQ ID NO: 67659 - DNA, 22 bp, Artificial Sequence
  chemically synthesized
ccgaccgtgtgcggggcgagtt

SEQ ID NO: 67660 - DNA, 22 bp, Artificial Sequence
  chemically synthesized
gctcaacaactctgccagcttc

SEQ ID NO: 67661 - DNA, 22 bp, Artificial Sequence
  chemically synthesized
ctcaacaactctgccagcttct

SEQ ID NO: 67662 - DNA, 22 bp, Artificial Sequence
  chemically synthesized
aacaactctgccagcttctggc

SEQ ID NO: 67663 - DNA, 22 bp, Artificial Sequence
  chemically synthesized
tgccagcttctggccctcaggc

SEQ ID NO: 67664 - DNA, 22 bp, Artificial Sequence
  chemically synthesized
ccagcttctggccctcaggctg

SEQ ID NO: 67665 - DNA, 22 bp, Artificial Sequence
  chemically synthesized
ctggccctcaggctgtgggaag

SEQ ID NO: 67666 - DNA, 22 bp, Artificial Sequence
  chemically synthesized
tggccctcaggctgtgggaagc

SEQ ID NO: 67667 - DNA, 22 bp, Artificial Sequence
  chemically synthesized
gccctcaggctgtgggaagctt

SEQ ID NO: 67668 - DNA, 22 bp, Artificial Sequence
  chemically synthesized
aggctgtgggaagcttcttccc

SEQ ID NO: 67669 - DNA, 22 bp, Artificial Sequence
  chemically synthesized
tgggaagcttcttcccggggcg

SEQ ID NO: 67670 - DNA, 22 bp, Artificial Sequence
  chemically synthesized
cttcccggggcgagaccactag

SEQ ID NO: 67671 - DNA, 22 bp, Artificial Sequence
  chemically synthesized
ttcccggggcgagaccactagc

SEQ ID NO: 67672 - DNA, 22 bp, Artificial Sequence
  chemically synthesized
cccggggcgagaccactagctt

SEQ ID NO: 67673 - DNA, 22 bp, Artificial Sequence
  chemically synthesized
ccggggcgagaccactagcttt

SEQ ID NO: 67674 - DNA, 22 bp, Artificial Sequence
  chemically synthesized
gctttttctaagtattaccagc

SEQ ID NO: 67675 - DNA, 22 bp, Artificial Sequence
  chemically synthesized
tttctaagtattaccagcccag

SEQ ID NO: 67676 - DNA, 22 bp, Artificial Sequence
  chemically synthesized
ttctaagtattaccagcccagg

SEQ ID NO: 67677 - DNA, 22 bp, Artificial Sequence
  chemically synthesized
tctaagtattaccagcccagga

SEQ ID NO: 67678 - DNA, 22 bp, Artificial Sequence
  chemically synthesized
ctaagtattaccagcccaggac

SEQ ID NO: 67679 - DNA, 22 bp, Artificial Sequence
  chemically synthesized
taagtattaccagcccaggact

SEQ ID NO: 67680 - DNA, 22 bp, Artificial Sequence
  chemically synthesized
agtattaccagcccaggacttg

SEQ ID NO: 67681 - DNA, 22 bp, Artificial Sequence
  chemically synthesized
ccagcccaggacttggctgagg

SEQ ID NO: 67682 - DNA, 22 bp, Artificial Sequence
  chemically synthesized
ggctgaggttctgtgtccccca

SEQ ID NO: 67683 - DNA, 22 bp, Artificial Sequence
  chemically synthesized
gctgaggttctgtgtcccccag

SEQ ID NO: 67684 - DNA, 22 bp, Artificial Sequence
  chemically synthesized
aggttctgtgtcccccagcttg

SEQ ID NO: 67685 - DNA, 22 bp, Artificial Sequence
  chemically synthesized
tgtgtcccccagcttggagtca

SEQ ID NO: 67686 - DNA, 22 bp, Artificial Sequence
  chemically synthesized
tgtcccccagcttggagtcaga

SEQ ID NO: 67687 - DNA, 22 bp, Artificial Sequence
  chemically synthesized
ggagtcagatgtggggttgaat

SEQ ID NO: 67688 - DNA, 22 bp, Artificial Sequence
  chemically synthesized
gagtcagatgtggggttgaatc

SEQ ID NO: 67689 - DNA, 22 bp, Artificial Sequence
  chemically synthesized
aatcttggcttcctctcactag

SEQ ID NO: 67690 - DNA, 22 bp, Artificial Sequence
  chemically synthesized
ggcttcctctcactagctgtgg

SEQ ID NO: 67691 - DNA, 22 bp, Artificial Sequence
  chemically synthesized
gcttcctctcactagctgtggt

SEQ ID NO: 67692 - DNA, 22 bp, Artificial Sequence
  chemically synthesized
cctctcactagctgtggtgctt

SEQ ID NO: 67693 - DNA, 22 bp, Artificial Sequence
  chemically synthesized
ctctcactagctgtggtgcttg

SEQ ID NO: 67694 - DNA, 22 bp, Artificial Sequence
  chemically synthesized
tcactagctgtggtgcttgaca

SEQ ID NO: 67695 - DNA, 22 bp, Artificial Sequence
  chemically synthesized
actagctgtggtgcttgacaag

SEQ ID NO: 67696 - DNA, 22 bp, Artificial Sequence
  chemically synthesized
gctgtggtgcttgacaagtcac

SEQ ID NO: 67697 - DNA, 22 bp, Artificial Sequence
  chemically synthesized
tggtgcttgacaagtcacttat

SEQ ID NO: 67698 - DNA, 22 bp, Artificial Sequence
  chemically synthesized
gacaagtcacttatccttgagc

SEQ ID NO: 67699 - DNA, 22 bp, Artificial Sequence
  chemically synthesized
acaagtcacttatccttgagcc

SEQ ID NO: 67700 - DNA, 22 bp, Artificial Sequence
  chemically synthesized
atccttgagcctccattgccta

SEQ ID NO: 67701 - DNA, 22 bp, Artificial Sequence
  chemically synthesized
tccttgagcctccattgcctaa

SEQ ID NO: 67702 - DNA, 22 bp, Artificial Sequence
  chemically synthesized
gagcctccattgcctaatcttt

SEQ ID NO: 67703 - DNA, 22 bp, Artificial Sequence
  chemically synthesized
agcctccattgcctaatcttta

SEQ ID NO: 67704 - DNA, 22 bp, Artificial Sequence
  chemically synthesized
cattgcctaatctttaaaaggg

SEQ ID NO: 67705 - DNA, 22 bp, Artificial Sequence
  chemically synthesized
cctaatctttaaaagggaggtg

SEQ ID NO: 67706 - DNA, 22 bp, Artificial Sequence
  chemically synthesized
atctttaaaagggaggtgacaa

SEQ ID NO: 67707 - DNA, 22 bp, Artificial Sequence
  chemically synthesized
taaaagggaggtgacaatcgtc

SEQ ID NO: 67708 - DNA, 22 bp, Artificial Sequence
  chemically synthesized
aaaagggaggtgacaatcgtcc

SEQ ID NO: 67709 - DNA, 22 bp, Artificial Sequence
  chemically synthesized
aaagggaggtgacaatcgtccc

SEQ ID NO: 67710 - DNA, 22 bp, Artificial Sequence
  chemically synthesized
cggctcagtggcagcagatggg

SEQ ID NO: 67711 - DNA, 22 bp, Artificial Sequence
  chemically synthesized
agtggcagcagatggggagatg

SEQ ID NO: 67712 - DNA, 22 bp, Artificial Sequence
  chemically synthesized
tgttgaccatgagtgaacttac

SEQ ID NO: 67713 - DNA, 22 bp, Artificial Sequence
  chemically synthesized
ttgaccatgagtgaacttacaa

SEQ ID NO: 67714 - DNA, 22 bp, Artificial Sequence
  chemically synthesized
accatgagtgaacttacaatgc

SEQ ID NO: 67715 - DNA, 22 bp, Artificial Sequence
  chemically synthesized
acaatgcaagccccggggggat

SEQ ID NO: 67716 - DNA, 22 bp, Artificial Sequence
  chemically synthesized
caatgcaagccccggggggatc

SEQ ID NO: 67717 - DNA, 22 bp, Artificial Sequence
  chemically synthesized
gcagttttgtccctgtctgcag

SEQ ID NO: 67718 - DNA, 22 bp, Artificial Sequence
  chemically synthesized
cagttttgtccctgtctgcagt

SEQ ID NO: 67719 - DNA, 22 bp, Artificial Sequence
  chemically synthesized
tgtccctgtctgcagtgtgacc

SEQ ID NO: 67720 - DNA, 22 bp, Artificial Sequence
  chemically synthesized
gtccctgtctgcagtgtgacct

SEQ ID NO: 67721 - DNA, 22 bp, Artificial Sequence
  chemically synthesized
tccctgtctgcagtgtgacctg

SEQ ID NO: 67722 - DNA, 22 bp, Artificial Sequence
  chemically synthesized
tctgcagtgtgacctgttggtg

SEQ ID NO: 67723 - DNA, 22 bp, Artificial Sequence
  chemically synthesized
cagtgtgacctgttggtgacat

SEQ ID NO: 67724 - DNA, 22 bp, Artificial Sequence
  chemically synthesized
ttggtgacattgtctttgctcc

SEQ ID NO: 67725 - DNA, 22 bp, Artificial Sequence
  chemically synthesized
gtgacattgtctttgctccaaa

SEQ ID NO: 67726 - DNA, 22 bp, Artificial Sequence
  chemically synthesized
tctttgctccaaaccacagctc

SEQ ID NO: 67727 - DNA, 22 bp, Artificial Sequence
  chemically synthesized
tgctccaaaccacagctcctgg

SEQ ID NO: 67728 - DNA, 22 bp, Artificial Sequence
  chemically synthesized
gctccaaaccacagctcctggg

SEQ ID NO: 67729 - DNA, 22 bp, Artificial Sequence
  chemically synthesized
ctccaaaccacagctcctgggg

SEQ ID NO: 67730 - DNA, 22 bp, Artificial Sequence
  chemically synthesized
caaaccacagctcctggggcag

SEQ ID NO: 67731 - DNA, 22 bp, Artificial Sequence
  chemically synthesized
ctggggcagaggggaaaattct

SEQ ID NO: 67732 - DNA, 22 bp, Artificial Sequence
  chemically synthesized
gggcagaggggaaaattctgcc

SEQ ID NO: 67733 - DNA, 22 bp, Artificial Sequence
  chemically synthesized
tgccactcacagctgcctgccc

SEQ ID NO: 67734 - DNA, 22 bp, Artificial Sequence
  chemically synthesized
ccactcacagctgcctgcccac

SEQ ID NO: 67735 - DNA, 22 bp, Artificial Sequence
  chemically synthesized
acagctgcctgcccacgcttct

SEQ ID NO: 67736 - DNA, 22 bp, Artificial Sequence
  chemically synthesized
cctgcccacgcttctgtctgag

SEQ ID NO: 67737 - DNA, 22 bp, Artificial Sequence
  chemically synthesized
cccacgcttctgtctgagtgtg

SEQ ID NO: 67738 - DNA, 22 bp, Artificial Sequence
  chemically synthesized
ctgtctgagtgtgctgggtggc

SEQ ID NO: 67739 - DNA, 22 bp, Artificial Sequence
  chemically synthesized
tgtctgagtgtgctgggtggca

SEQ ID NO: 67740 - DNA, 22 bp, Artificial Sequence
  chemically synthesized
tctgagtgtgctgggtggcagg

SEQ ID NO: 67741 - DNA, 22 bp, Artificial Sequence
  chemically synthesized
agtgtgctgggtggcaggatgg

SEQ ID NO: 67742 - DNA, 22 bp, Artificial Sequence
  chemically synthesized
ggtggcaggatggcaagtcctt

SEQ ID NO: 67743 - DNA, 22 bp, Artificial Sequence
  chemically synthesized
actcagctcagtatagccctct

SEQ ID NO: 67744 - DNA, 22 bp, Artificial Sequence
  chemically synthesized
ctcagctcagtatagccctctt

SEQ ID NO: 67745 - DNA, 22 bp, Artificial Sequence
  chemically synthesized
agctcagtatagccctcttcct

SEQ ID NO: 67746 - DNA, 22 bp, Artificial Sequence
  chemically synthesized
agtatagccctcttccttgttc

SEQ ID NO: 67747 - DNA, 22 bp, Artificial Sequence
  chemically synthesized
ttccttgttccctgagcctttg

SEQ ID NO: 67748 - DNA, 22 bp, Artificial Sequence
  chemically synthesized
ccttgttccctgagcctttgac

SEQ ID NO: 67749 - DNA, 22 bp, Artificial Sequence
  chemically synthesized
cttgttccctgagcctttgact

SEQ ID NO: 67750 - DNA, 22 bp, Artificial Sequence
  chemically synthesized
gttccctgagcctttgactttc

SEQ ID NO: 67751 - DNA, 22 bp, Artificial Sequence
  chemically synthesized
ttccctgagcctttgactttct

SEQ ID NO: 67752 - DNA, 22 bp, Artificial Sequence
  chemically synthesized
cctgagcctttgactttctcga

SEQ ID NO: 67753 - DNA, 22 bp, Artificial Sequence
  chemically synthesized
agcctttgactttctcgaggga

SEQ ID NO: 67754 - DNA, 22 bp, Artificial Sequence
  chemically synthesized
tgactttctcgagggatgttgt

SEQ ID NO: 67755 - DNA, 22 bp, Artificial Sequence
  chemically synthesized
gactttctcgagggatgttgtg

SEQ ID NO: 67756 - DNA, 22 bp, Artificial Sequence
  chemically synthesized
actttctcgagggatgttgtgg

SEQ ID NO: 67757 - DNA, 22 bp, Artificial Sequence
  chemically synthesized
tctcgagggatgttgtggggtt

SEQ ID NO: 67758 - DNA, 22 bp, Artificial Sequence
  chemically synthesized
ctcgagggatgttgtggggttg

SEQ ID NO: 67759 - DNA, 22 bp, Artificial Sequence
  chemically synthesized
tcgagggatgttgtggggttgt

SEQ ID NO: 67760 - DNA, 22 bp, Artificial Sequence
  chemically synthesized
gagggatgttgtggggttgtgg

SEQ ID NO: 67761 - DNA, 22 bp, Artificial Sequence
  chemically synthesized
tggggttgtggccaggataaga

SEQ ID NO: 67762 - DNA, 22 bp, Artificial Sequence
  chemically synthesized
tggccaggataagaaagggcat

SEQ ID NO: 67763 - DNA, 22 bp, Artificial Sequence
  chemically synthesized
caagttaccactgctccaaaac

SEQ ID NO: 67764 - DNA, 22 bp, Artificial Sequence
  chemically synthesized
aagttaccactgctccaaaaca

SEQ ID NO: 67765 - DNA, 22 bp, Artificial Sequence
  chemically synthesized
ccactgctccaaaacaactgtt

SEQ ID NO: 67766 - DNA, 22 bp, Artificial Sequence
  chemically synthesized
ctccaaaacaactgttctggaa

SEQ ID NO: 67767 - DNA, 22 bp, Artificial Sequence
  chemically synthesized
caaaacaactgttctggaaata

SEQ ID NO: 67768 - DNA, 22 bp, Artificial Sequence
  chemically synthesized
ttctggaaatagtgagtacccc

SEQ ID NO: 67769 - DNA, 22 bp, Artificial Sequence
  chemically synthesized
tggaaatagtgagtaccccatc

SEQ ID NO: 67770 - DNA, 22 bp, Artificial Sequence
  chemically synthesized
gaaatagtgagtaccccatcct

SEQ ID NO: 67771 - DNA, 22 bp, Artificial Sequence
  chemically synthesized
agaggtgagtaagcagaggctg

SEQ ID NO: 67772 - DNA, 22 bp, Artificial Sequence
  chemically synthesized
tatgaccacctgaaccaagccc

SEQ ID NO: 67773 - DNA, 22 bp, Artificial Sequence
  chemically synthesized
aaccaagcccttgaggatgttt

SEQ ID NO: 67774 - DNA, 22 bp, Artificial Sequence
  chemically synthesized
gaggatgtttcttctctggtgg

SEQ ID NO: 67775 - DNA, 22 bp, Artificial Sequence
  chemically synthesized
aggatgtttcttctctggtgga

SEQ ID NO: 67776 - DNA, 22 bp, Artificial Sequence
  chemically synthesized
cttctctggtggaagtttggaa

SEQ ID NO: 67777 - DNA, 22 bp, Artificial Sequence
  chemically synthesized
ttctctggtggaagtttggaac

SEQ ID NO: 67778 - DNA, 22 bp, Artificial Sequence
  chemically synthesized
ctctggtggaagtttggaacag

SEQ ID NO: 67779 - DNA, 22 bp, Artificial Sequence
  chemically synthesized
tctggtggaagtttggaacagg

SEQ ID NO: 67780 - DNA, 22 bp, Artificial Sequence
  chemically synthesized
tggtggaagtttggaacaggag

SEQ ID NO: 67781 - DNA, 22 bp, Artificial Sequence
  chemically synthesized
gtggaagtttggaacaggagcc

SEQ ID NO: 67782 - DNA, 22 bp, Artificial Sequence
  chemically synthesized
ggaacaggagcctcctcaagtt

SEQ ID NO: 67783 - DNA, 22 bp, Artificial Sequence
  chemically synthesized
gaacaggagcctcctcaagttc

SEQ ID NO: 67784 - DNA, 22 bp, Artificial Sequence
  chemically synthesized
ctcaagttcatttattcattca

SEQ ID NO: 67785 - DNA, 22 bp, Artificial Sequence
  chemically synthesized
aagttcatttattcattcattc

SEQ ID NO: 67786 - DNA, 22 bp, Artificial Sequence
  chemically synthesized
atttattcattcattcaatggt

SEQ ID NO: 67787 - DNA, 22 bp, Artificial Sequence
  chemically synthesized
attcattcattcaatggttatt

SEQ ID NO: 67788 - DNA, 22 bp, Artificial Sequence
  chemically synthesized
ttcattcattcaatggttattt

SEQ ID NO: 67789 - DNA, 22 bp, Artificial Sequence
  chemically synthesized
attcattcaatggttattttgt

SEQ ID NO: 67790 - DNA, 22 bp, Artificial Sequence
  chemically synthesized
attcaatggttattttgtggga

SEQ ID NO: 67791 - DNA, 22 bp, Artificial Sequence
  chemically synthesized
aatggttattttgtgggaatcg

SEQ ID NO: 67792 - DNA, 22 bp, Artificial Sequence
  chemically synthesized
ttttgtgggaatcgaatttaga

SEQ ID NO: 67793 - DNA, 22 bp, Artificial Sequence
  chemically synthesized
tgtgggaatcgaatttagaatg

SEQ ID NO: 67794 - DNA, 22 bp, Artificial Sequence
  chemically synthesized
gtgggaatcgaatttagaatga

SEQ ID NO: 67795 - DNA, 22 bp, Artificial Sequence
  chemically synthesized
tgggaatcgaatttagaatgaa

SEQ ID NO: 67796 - DNA, 22 bp, Artificial Sequence
  chemically synthesized
agaatgaaaatattttttggca

SEQ ID NO: 67797 - DNA, 22 bp, Artificial Sequence
  chemically synthesized
gaatgaaaatattttttggcaa

SEQ ID NO: 67798 - DNA, 22 bp, Artificial Sequence
  chemically synthesized
tttggcaagcagaaaataattt

SEQ ID NO: 67799 - DNA, 22 bp, Artificial Sequence
  chemically synthesized
ttggcaagcagaaaataatttt

SEQ ID NO: 67800 - DNA, 22 bp, Artificial Sequence
  chemically synthesized
tggcaagcagaaaataattttt

SEQ ID NO: 67801 - DNA, 22 bp, Artificial Sequence
  chemically synthesized
ggcaagcagaaaataattttta

SEQ ID NO: 67802 - DNA, 22 bp, Artificial Sequence
  chemically synthesized
gcaagcagaaaataatttttag

SEQ ID NO: 67803 - DNA, 22 bp, Artificial Sequence
  chemically synthesized
ttagaccaatccttttctttta

SEQ ID NO: 67804 - DNA, 22 bp, Artificial Sequence
  chemically synthesized
tagaccaatccttttcttttag

SEQ ID NO: 67805 - DNA, 22 bp, Artificial Sequence
  chemically synthesized
agaccaatccttttcttttagt

SEQ ID NO: 67806 - DNA, 22 bp, Artificial Sequence
  chemically synthesized
gaccaatccttttcttttagtc

SEQ ID NO: 67807 - DNA, 22 bp, Artificial Sequence
  chemically synthesized
ttcttttagtcatgagaaactg

SEQ ID NO: 67808 - DNA, 22 bp, Artificial Sequence
  chemically synthesized
tcttttagtcatgagaaactga

SEQ ID NO: 67809 - DNA, 22 bp, Artificial Sequence
  chemically synthesized
cttttagtcatgagaaactgag

SEQ ID NO: 67810 - DNA, 22 bp, Artificial Sequence
  chemically synthesized
ttttagtcatgagaaactgagg

SEQ ID NO: 67811 - DNA, 22 bp, Artificial Sequence
  chemically synthesized
ttagtcatgagaaactgaggcc

SEQ ID NO: 67812 - DNA, 22 bp, Artificial Sequence
  chemically synthesized
tagtcatgagaaactgaggccc

SEQ ID NO: 67813 - DNA, 22 bp, Artificial Sequence
  chemically synthesized
agtcatgagaaactgaggccca

SEQ ID NO: 67814 - DNA, 22 bp, Artificial Sequence
  chemically synthesized
gtcatgagaaactgaggcccag

SEQ ID NO: 67815 - DNA, 22 bp, Artificial Sequence
  chemically synthesized
aggcccagagagaggaggtcac

SEQ ID NO: 67816 - DNA, 22 bp, Artificial Sequence
  chemically synthesized
gaactgggtttccagaactgac

SEQ ID NO: 67817 - DNA, 22 bp, Artificial Sequence
  chemically synthesized
ggtttccagaactgacactcca

SEQ ID NO: 67818 - DNA, 22 bp, Artificial Sequence
  chemically synthesized
ccagaactgacactccactgca

SEQ ID NO: 67819 - DNA, 22 bp, Artificial Sequence
  chemically synthesized
cagaactgacactccactgcac

SEQ ID NO: 67820 - DNA, 22 bp, Artificial Sequence
  chemically synthesized
acactccactgcacagagtact

SEQ ID NO: 67821 - DNA, 22 bp, Artificial Sequence
  chemically synthesized
cactgcacagagtactctccca

SEQ ID NO: 67822 - DNA, 22 bp, Artificial Sequence
  chemically synthesized
cacagagtactctcccaattca

SEQ ID NO: 67823 - DNA, 22 bp, Artificial Sequence
  chemically synthesized
tcccaattcattcaatttttat

SEQ ID NO: 67824 - DNA, 22 bp, Artificial Sequence
  chemically synthesized
ccaattcattcaatttttattt

SEQ ID NO: 67825 - DNA, 22 bp, Artificial Sequence
  chemically synthesized
attcaatttttatttagcggaa

SEQ ID NO: 67826 - DNA, 22 bp, Artificial Sequence
  chemically synthesized
aatttttatttagcggaaggca

SEQ ID NO: 67827 - DNA, 22 bp, Artificial Sequence
  chemically synthesized
ttatttagcggaaggcattttc

SEQ ID NO: 67828 - DNA, 22 bp, Artificial Sequence
  chemically synthesized
tatttagcggaaggcattttca

SEQ ID NO: 67829 - DNA, 22 bp, Artificial Sequence
  chemically synthesized
atttagcggaaggcattttcag

SEQ ID NO: 67830 - DNA, 22 bp, Artificial Sequence
  chemically synthesized
tttagcggaaggcattttcaga

SEQ ID NO: 67831 - DNA, 22 bp, Artificial Sequence
  chemically synthesized
agcggaaggcattttcagatgg

SEQ ID NO: 67832 - DNA, 22 bp, Artificial Sequence
  chemically synthesized
gcggaaggcattttcagatggg

SEQ ID NO: 67833 - DNA, 22 bp, Artificial Sequence
  chemically synthesized
tcagatgggtctttgaagcatt

SEQ ID NO: 67834 - DNA, 22 bp, Artificial Sequence
  chemically synthesized
cagatgggtctttgaagcatta

SEQ ID NO: 67835 - DNA, 22 bp, Artificial Sequence
  chemically synthesized
agatgggtctttgaagcattag

SEQ ID NO: 67836 - DNA, 22 bp, Artificial Sequence
  chemically synthesized
tgaagcattagtaggagttcag

SEQ ID NO: 67837 - DNA, 22 bp, Artificial Sequence
  chemically synthesized
gaagcattagtaggagttcagc

SEQ ID NO: 67838 - DNA, 22 bp, Artificial Sequence
  chemically synthesized
aagcattagtaggagttcagcg

SEQ ID NO: 67839 - DNA, 22 bp, Artificial Sequence
  chemically synthesized
gtaggagttcagcgatgatggt

SEQ ID NO: 67840 - DNA, 22 bp, Artificial Sequence
  chemically synthesized
agcgatgatggtgtcatgagaa

SEQ ID NO: 67841 - DNA, 22 bp, Artificial Sequence
  chemically synthesized
tattctaggattaggaggtacc

SEQ ID NO: 67842 - DNA, 22 bp, Artificial Sequence
  chemically synthesized
attctaggattaggaggtacca

SEQ ID NO: 67843 - DNA, 22 bp, Artificial Sequence
  chemically synthesized
ttctaggattaggaggtaccat

SEQ ID NO: 67844 - DNA, 22 bp, Artificial Sequence
  chemically synthesized
taggattaggaggtaccatgaa

SEQ ID NO: 67845 - DNA, 22 bp, Artificial Sequence
  chemically synthesized
ggattaggaggtaccatgaaca

SEQ ID NO: 67846 - DNA, 22 bp, Artificial Sequence
  chemically synthesized
ggaggtaccatgaacaaagata

SEQ ID NO: 67847 - DNA, 22 bp, Artificial Sequence
  chemically synthesized
ggaaaaccagaggtggaagata

SEQ ID NO: 67848 - DNA, 22 bp, Artificial Sequence
  chemically synthesized
tttttcttttttttttgagatg

SEQ ID NO: 67849 - DNA, 22 bp, Artificial Sequence
  chemically synthesized
tttcttttttttttgagatgga

SEQ ID NO: 67850 - DNA, 22 bp, Artificial Sequence
  chemically synthesized
ttcttttttttttgagatggag

SEQ ID NO: 67851 - DNA, 22 bp, Artificial Sequence
  chemically synthesized
tcttttttttttgagatggagt

SEQ ID NO: 67852 - DNA, 22 bp, Artificial Sequence
  chemically synthesized
cttttttttttgagatggagtt

SEQ ID NO: 67853 - DNA, 22 bp, Artificial Sequence
  chemically synthesized
ttttttttttgagatggagttt

SEQ ID NO: 67854 - DNA, 22 bp, Artificial Sequence
  chemically synthesized
ttttttttgagatggagtttcg

SEQ ID NO: 67855 - DNA, 22 bp, Artificial Sequence
  chemically synthesized
tttttttgagatggagtttcgc

SEQ ID NO: 67856 - DNA, 22 bp, Artificial Sequence
  chemically synthesized
ttttttgagatggagtttcgct

SEQ ID NO: 67857 - DNA, 22 bp, Artificial Sequence
  chemically synthesized
tttttgagatggagtttcgctc

SEQ ID NO: 67858 - DNA, 22 bp, Artificial Sequence
  chemically synthesized
ttttgagatggagtttcgctct

SEQ ID NO: 67859 - DNA, 22 bp, Artificial Sequence
  chemically synthesized
tttgagatggagtttcgctctt

SEQ ID NO: 67860 - DNA, 22 bp, Artificial Sequence
  chemically synthesized
ttgagatggagtttcgctcttg

SEQ ID NO: 67861 - DNA, 22 bp, Artificial Sequence
  chemically synthesized
tgagatggagtttcgctcttgt

SEQ ID NO: 67862 - DNA, 22 bp, Artificial Sequence
  chemically synthesized
gagatggagtttcgctcttgtt

SEQ ID NO: 67863 - DNA, 22 bp, Artificial Sequence
  chemically synthesized
agatggagtttcgctcttgttg

SEQ ID NO: 67864 - DNA, 22 bp, Artificial Sequence
  chemically synthesized
cgctcttgttgcccaggctgga

SEQ ID NO: 67865 - DNA, 22 bp, Artificial Sequence
  chemically synthesized
gctcttgttgcccaggctggag

SEQ ID NO: 67866 - DNA, 22 bp, Artificial Sequence
  chemically synthesized
ttgttgcccaggctggagtgca

SEQ ID NO: 67867 - DNA, 22 bp, Artificial Sequence
  chemically synthesized
gttgcccaggctggagtgcaat

SEQ ID NO: 67868 - DNA, 22 bp, Artificial Sequence
  chemically synthesized
ttgcccaggctggagtgcaatg

SEQ ID NO: 67869 - DNA, 22 bp, Artificial Sequence
  chemically synthesized
cccaggctggagtgcaatggtg

SEQ ID NO: 67870 - DNA, 22 bp, Artificial Sequence
  chemically synthesized
gagtgcaatggtgcagtctcag

SEQ ID NO: 67871 - DNA, 22 bp, Artificial Sequence
  chemically synthesized
agctcactgcaacatctgtctc

SEQ ID NO: 67872 - DNA, 22 bp, Artificial Sequence
  chemically synthesized
actgcaacatctgtctcccggg

SEQ ID NO: 67873 - DNA, 22 bp, Artificial Sequence
  chemically synthesized
caacatctgtctcccgggttca

SEQ ID NO: 67874 - DNA, 22 bp, Artificial Sequence
  chemically synthesized
tctcccgggttcaagtggttct

SEQ ID NO: 67875 - DNA, 22 bp, Artificial Sequence
  chemically synthesized
ccgggttcaagtggttctcctg

SEQ ID NO: 67876 - DNA, 22 bp, Artificial Sequence
  chemically synthesized
aagtggttctcctgcctcagcc

SEQ ID NO: 67877 - DNA, 22 bp, Artificial Sequence
  chemically synthesized
tcctgcctcagcctcccaagaa

SEQ ID NO: 67878 - DNA, 22 bp, Artificial Sequence
  chemically synthesized
ctgcctcagcctcccaagaagc

SEQ ID NO: 67879 - DNA, 22 bp, Artificial Sequence
  chemically synthesized
cctcagcctcccaagaagctgg

SEQ ID NO: 67880 - DNA, 22 bp, Artificial Sequence
  chemically synthesized
agcctcccaagaagctgggatt

SEQ ID NO: 67881 - DNA, 22 bp, Artificial Sequence
  chemically synthesized
ccaagaagctgggattacaggt

SEQ ID NO: 67882 - DNA, 22 bp, Artificial Sequence
  chemically synthesized
ggattacaggtacctgccacca

SEQ ID NO: 67883 - DNA, 22 bp, Artificial Sequence
  chemically synthesized
caggtacctgccaccacgcccg

SEQ ID NO: 67884 - DNA, 22 bp, Artificial Sequence
  chemically synthesized
ccaccacgcccggctaattttt

SEQ ID NO: 67885 - DNA, 22 bp, Artificial Sequence
  chemically synthesized
atttttgtatttttagtagaga

SEQ ID NO: 67886 - DNA, 22 bp, Artificial Sequence
  chemically synthesized
ttgtatttttagtagagaaggg

SEQ ID NO: 67887 - DNA, 22 bp, Artificial Sequence
  chemically synthesized
tgtatttttagtagagaagggg

SEQ ID NO: 67888 - DNA, 22 bp, Artificial Sequence
  chemically synthesized
gtatttttagtagagaaggggt

SEQ ID NO: 67889 - DNA, 22 bp, Artificial Sequence
  chemically synthesized
tatttttagtagagaaggggtt

SEQ ID NO: 67890 - DNA, 22 bp, Artificial Sequence
  chemically synthesized
ttagtagagaaggggtttcacc

SEQ ID NO: 67891 - DNA, 22 bp, Artificial Sequence
  chemically synthesized
tagtagagaaggggtttcacca

SEQ ID NO: 67892 - DNA, 22 bp, Artificial Sequence
  chemically synthesized
agtagagaaggggtttcaccac

SEQ ID NO: 67893 - DNA, 22 bp, Artificial Sequence
  chemically synthesized
gtagagaaggggtttcaccacg

SEQ ID NO: 67894 - DNA, 22 bp, Artificial Sequence
  chemically synthesized
caccacgttggccaggctagtc

SEQ ID NO: 67895 - DNA, 22 bp, Artificial Sequence
  chemically synthesized
accacgttggccaggctagtcg

SEQ ID NO: 67896 - DNA, 22 bp, Artificial Sequence
  chemically synthesized
gccaggctagtcgcaaactcct

SEQ ID NO: 67897 - DNA, 22 bp, Artificial Sequence
  chemically synthesized
gtcgcaaactcctgacctcctc

SEQ ID NO: 67898 - DNA, 22 bp, Artificial Sequence
  chemically synthesized
ctgacctcctcagtggatccga

SEQ ID NO: 67899 - DNA, 22 bp, Artificial Sequence
  chemically synthesized
acctcctcagtggatccgagga

SEQ ID NO: 67900 - DNA, 22 bp, Artificial Sequence
  chemically synthesized
ctcagtggatccgaggaggtga

SEQ ID NO: 67901 - DNA, 22 bp, Artificial Sequence
  chemically synthesized
agtggatccgaggaggtgatcc

SEQ ID NO: 67902 - DNA, 22 bp, Artificial Sequence
  chemically synthesized
ccgcctcagcctcccaaagtgc

SEQ ID NO: 67903 - DNA, 22 bp, Artificial Sequence
  chemically synthesized
agcctcccaaagtgctcgaatt

SEQ ID NO: 67904 - DNA, 22 bp, Artificial Sequence
  chemically synthesized
ccaaagtgctcgaattacaggt

SEQ ID NO: 67905 - DNA, 22 bp, Artificial Sequence
  chemically synthesized
gaattacaggtgtgagccacca

SEQ ID NO: 67906 - DNA, 22 bp, Artificial Sequence
  chemically synthesized
caggtgtgagccaccacgcctg

SEQ ID NO: 67907 - DNA, 22 bp, Artificial Sequence
  chemically synthesized
gcctccacagttctttatccac

SEQ ID NO: 67908 - DNA, 22 bp, Artificial Sequence
  chemically synthesized
cacagttctttatccaccgtct

SEQ ID NO: 67909 - DNA, 22 bp, Artificial Sequence
  chemically synthesized
tttatccaccgtctgaaatgta

SEQ ID NO: 67910 - DNA, 22 bp, Artificial Sequence
  chemically synthesized
tatccaccgtctgaaatgtaaa

SEQ ID NO: 67911 - DNA, 22 bp, Artificial Sequence
  chemically synthesized
atccaccgtctgaaatgtaaaa

SEQ ID NO: 67912 - DNA, 22 bp, Artificial Sequence
  chemically synthesized
tccaccgtctgaaatgtaaaat

SEQ ID NO: 67913 - DNA, 22 bp, Artificial Sequence
  chemically synthesized
aaatgtaaaatgttacgaaaac

SEQ ID NO: 67914 - DNA, 22 bp, Artificial Sequence
  chemically synthesized
cgaaaaccaaaagttttttttg

SEQ ID NO: 67915 - DNA, 22 bp, Artificial Sequence
  chemically synthesized
tttttgtgatttatttgatggt

SEQ ID NO: 67916 - DNA, 22 bp, Artificial Sequence
  chemically synthesized
ttttgtgatttatttgatggta

SEQ ID NO: 67917 - DNA, 22 bp, Artificial Sequence
  chemically synthesized
tttgtgatttatttgatggtag

SEQ ID NO: 67918 - DNA, 22 bp, Artificial Sequence
  chemically synthesized
ttgtgatttatttgatggtagc

SEQ ID NO: 67919 - DNA, 22 bp, Artificial Sequence
  chemically synthesized
tgtgatttatttgatggtagca

SEQ ID NO: 67920 - DNA, 22 bp, Artificial Sequence
  chemically synthesized
gtgatttatttgatggtagcac

SEQ ID NO: 67921 - DNA, 22 bp, Artificial Sequence
  chemically synthesized
tgatttatttgatggtagcacc

SEQ ID NO: 67922 - DNA, 22 bp, Artificial Sequence
  chemically synthesized
atttgatggtagcacctgacgt

SEQ ID NO: 67923 - DNA, 22 bp, Artificial Sequence
  chemically synthesized
tttgatggtagcacctgacgtg

SEQ ID NO: 67924 - DNA, 22 bp, Artificial Sequence
  chemically synthesized
gatggtagcacctgacgtgaac

SEQ ID NO: 67925 - DNA, 22 bp, Artificial Sequence
  chemically synthesized
atggtagcacctgacgtgaact

SEQ ID NO: 67926 - DNA, 22 bp, Artificial Sequence
  chemically synthesized
acgtgaactgacatgagattat

SEQ ID NO: 67927 - DNA, 22 bp, Artificial Sequence
  chemically synthesized
acatgagattatttttaattta

SEQ ID NO: 67928 - DNA, 22 bp, Artificial Sequence
  chemically synthesized
tttttaatttagttgtgtgaat

SEQ ID NO: 67929 - DNA, 22 bp, Artificial Sequence
  chemically synthesized
ttaatttagttgtgtgaatatg

SEQ ID NO: 67930 - DNA, 22 bp, Artificial Sequence
  chemically synthesized
taatttagttgtgtgaatatgc

SEQ ID NO: 67931 - DNA, 22 bp, Artificial Sequence
  chemically synthesized
aatttagttgtgtgaatatgca

SEQ ID NO: 67932 - DNA, 22 bp, Artificial Sequence
  chemically synthesized
atttagttgtgtgaatatgcat

SEQ ID NO: 67933 - DNA, 22 bp, Artificial Sequence
  chemically synthesized
agttgtgtgaatatgcatattc

SEQ ID NO: 67934 - DNA, 22 bp, Artificial Sequence
  chemically synthesized
gttgtgtgaatatgcatattca

SEQ ID NO: 67935 - DNA, 22 bp, Artificial Sequence
  chemically synthesized
tgtgaatatgcatattcatata

SEQ ID NO: 67936 - DNA, 22 bp, Artificial Sequence
  chemically synthesized
atatattttgctgcatagatta

SEQ ID NO: 67937 - DNA, 22 bp, Artificial Sequence
  chemically synthesized
tgctgcatagattacagtatgc

SEQ ID NO: 67938 - DNA, 22 bp, Artificial Sequence
  chemically synthesized
gctgcatagattacagtatgca

SEQ ID NO: 67939 - DNA, 22 bp, Artificial Sequence
  chemically synthesized
ctgcatagattacagtatgcag

SEQ ID NO: 67940 - DNA, 22 bp, Artificial Sequence
  chemically synthesized
catagattacagtatgcagctc

SEQ ID NO: 67941 - DNA, 22 bp, Artificial Sequence
  chemically synthesized
cagtatgcagctccagattctt

SEQ ID NO: 67942 - DNA, 22 bp, Artificial Sequence
  chemically synthesized
cagattcttccaagcagactct

SEQ ID NO: 67943 - DNA, 22 bp, Artificial Sequence
  chemically synthesized
ttccaagcagactctgattgcc

SEQ ID NO: 67944 - DNA, 22 bp, Artificial Sequence
  chemically synthesized
ccaagcagactctgattgccca

SEQ ID NO: 67945 - DNA, 22 bp, Artificial Sequence
  chemically synthesized
caagcagactctgattgcccat

SEQ ID NO: 67946 - DNA, 22 bp, Artificial Sequence
  chemically synthesized
tgattgcccattactgcctttc

SEQ ID NO: 67947 - DNA, 22 bp, Artificial Sequence
  chemically synthesized
attgcccattactgcctttcta

SEQ ID NO: 67948 - DNA, 22 bp, Artificial Sequence
  chemically synthesized
cccattactgcctttctaaaat

SEQ ID NO: 67949 - DNA, 22 bp, Artificial Sequence
  chemically synthesized
ctgcctttctaaaatccaaaca

SEQ ID NO: 67950 - DNA, 22 bp, Artificial Sequence
  chemically synthesized
cctttctaaaatccaaacaagt

SEQ ID NO: 67951 - DNA, 22 bp, Artificial Sequence
  chemically synthesized
tctaaaatccaaacaagttctg

SEQ ID NO: 67952 - DNA, 22 bp, Artificial Sequence
  chemically synthesized
ctaaaatccaaacaagttctga

SEQ ID NO: 67953 - DNA, 22 bp, Artificial Sequence
  chemically synthesized
taaaatccaaacaagttctgag

SEQ ID NO: 67954 - DNA, 22 bp, Artificial Sequence
  chemically synthesized
aaatccaaacaagttctgaggt

SEQ ID NO: 67955 - DNA, 22 bp, Artificial Sequence
  chemically synthesized
tgaggttcaaaaccgttttggc

SEQ ID NO: 67956 - DNA, 22 bp, Artificial Sequence
  chemically synthesized
aggttcaaaaccgttttggccc

SEQ ID NO: 67957 - DNA, 22 bp, Artificial Sequence
  chemically synthesized
aaaaccgttttggccctaaggc

SEQ ID NO: 67958 - DNA, 22 bp, Artificial Sequence
  chemically synthesized
tggccctaaggctttgggtaaa

SEQ ID NO: 67959 - DNA, 22 bp, Artificial Sequence
  chemically synthesized
ggccctaaggctttgggtaaag

SEQ ID NO: 67960 - DNA, 22 bp, Artificial Sequence
  chemically synthesized
gccctaaggctttgggtaaagg

SEQ ID NO: 67961 - DNA, 22 bp, Artificial Sequence
  chemically synthesized
aggctttgggtaaagggggtgg

SEQ ID NO: 67962 - DNA, 22 bp, Artificial Sequence
  chemically synthesized
tgggtaaagggggtggactctg

SEQ ID NO: 67963 - DNA, 22 bp, Artificial Sequence
  chemically synthesized
gggtaaagggggtggactctgt

SEQ ID NO: 67964 - DNA, 22 bp, Artificial Sequence
  chemically synthesized
ggtaaagggggtggactctgtt

SEQ ID NO: 67965 - DNA, 22 bp, Artificial Sequence
  chemically synthesized
tgttctactctgactggagtcc

SEQ ID NO: 67966 - DNA, 22 bp, Artificial Sequence
  chemically synthesized
ttctactctgactggagtccaa

SEQ ID NO: 67967 - DNA, 22 bp, Artificial Sequence
  chemically synthesized
tactctgactggagtccaagat

SEQ ID NO: 67968 - DNA, 22 bp, Artificial Sequence
  chemically synthesized
ctctgactggagtccaagatgc

SEQ ID NO: 67969 - DNA, 22 bp, Artificial Sequence
  chemically synthesized
tgactggagtccaagatgcata

SEQ ID NO: 67970 - DNA, 22 bp, Artificial Sequence
  chemically synthesized
actggagtccaagatgcatata

SEQ ID NO: 67971 - DNA, 22 bp, Artificial Sequence
  chemically synthesized
gagtccaagatgcatatataca

SEQ ID NO: 67972 - DNA, 22 bp, Artificial Sequence
  chemically synthesized
caaggtaggttgaggtaggggc

SEQ ID NO: 67973 - DNA, 22 bp, Artificial Sequence
  chemically synthesized
aggtaggggccaaggaggagca

SEQ ID NO: 67974 - DNA, 22 bp, Artificial Sequence
  chemically synthesized
ggacttgattcatgaggctgtg

SEQ ID NO: 67975 - DNA, 22 bp, Artificial Sequence
  chemically synthesized
gacttgattcatgaggctgtgg

SEQ ID NO: 67976 - DNA, 22 bp, Artificial Sequence
  chemically synthesized
gattcatgaggctgtggggagc

SEQ ID NO: 67977 - DNA, 22 bp, Artificial Sequence
  chemically synthesized
attcatgaggctgtggggagcc

SEQ ID NO: 67978 - DNA, 22 bp, Artificial Sequence
  chemically synthesized
atgaggctgtggggagccagtg

SEQ ID NO: 67979 - DNA, 22 bp, Artificial Sequence
  chemically synthesized
tggggagccagtgaaggttctt

SEQ ID NO: 67980 - DNA, 22 bp, Artificial Sequence
  chemically synthesized
ttaagcaggtatgtctgcctga

SEQ ID NO: 67981 - DNA, 22 bp, Artificial Sequence
  chemically synthesized
aagcaggtatgtctgcctgaga

SEQ ID NO: 67982 - DNA, 22 bp, Artificial Sequence
  chemically synthesized
agcaggtatgtctgcctgagag

SEQ ID NO: 67983 - DNA, 22 bp, Artificial Sequence
  chemically synthesized
cctgagagcagttggagcagac

SEQ ID NO: 67984 - DNA, 22 bp, Artificial Sequence
  chemically synthesized
agagcagttggagcagacaaga

SEQ ID NO: 67985 - DNA, 22 bp, Artificial Sequence
  chemically synthesized
gagcagacaagagctaaaaacc

SEQ ID NO: 67986 - DNA, 22 bp, Artificial Sequence
  chemically synthesized
aaaaccaaacaaatcaccatag

SEQ ID NO: 67987 - DNA, 22 bp, Artificial Sequence
  chemically synthesized
ctataatttgtttgtcccctcc

SEQ ID NO: 67988 - DNA, 22 bp, Artificial Sequence
  chemically synthesized
taatttgtttgtcccctccaaa

SEQ ID NO: 67989 - DNA, 22 bp, Artificial Sequence
  chemically synthesized
gtttgtcccctccaaatctcat

SEQ ID NO: 67990 - DNA, 22 bp, Artificial Sequence
  chemically synthesized
tttgtcccctccaaatctcatg

SEQ ID NO: 67991 - DNA, 22 bp, Artificial Sequence
  chemically synthesized
gtcccctccaaatctcatgtgg

SEQ ID NO: 67992 - DNA, 22 bp, Artificial Sequence
  chemically synthesized
tcccctccaaatctcatgtgga

SEQ ID NO: 67993 - DNA, 22 bp, Artificial Sequence
  chemically synthesized
caaatctcatgtggaaatttgg

SEQ ID NO: 67994 - DNA, 22 bp, Artificial Sequence
  chemically synthesized
atgtggaaatttggtcctcagt

SEQ ID NO: 67995 - DNA, 22 bp, Artificial Sequence
  chemically synthesized
ggtcctcagtgttggaagtggg

SEQ ID NO: 67996 - DNA, 22 bp, Artificial Sequence
  chemically synthesized
gtcctcagtgttggaagtgggg

SEQ ID NO: 67997 - DNA, 22 bp, Artificial Sequence
  chemically synthesized
agtgttggaagtggggcctaat

SEQ ID NO: 67998 - DNA, 22 bp, Artificial Sequence
  chemically synthesized
gaagtggggcctaatgggaggt

SEQ ID NO: 67999 - DNA, 22 bp, Artificial Sequence
  chemically synthesized
atgggaggtgtttgggtcatgg

SEQ ID NO: 68000 - DNA, 22 bp, Artificial Sequence
  chemically synthesized
gggtcatgggggaggaacccct

SEQ ID NO: 68001 - DNA, 22 bp, Artificial Sequence
  chemically synthesized
ggtcatgggggaggaacccctg

SEQ ID NO: 68002 - DNA, 22 bp, Artificial Sequence
  chemically synthesized
tgaaaggcttggtgccgtcctt

SEQ ID NO: 68003 - DNA, 22 bp, Artificial Sequence
  chemically synthesized
ggtgccgtccttgtgataatga

SEQ ID NO: 68004 - DNA, 22 bp, Artificial Sequence
  chemically synthesized
gtgccgtccttgtgataatgag

SEQ ID NO: 68005 - DNA, 22 bp, Artificial Sequence
  chemically synthesized
gtgataatgagtaagttctccc

SEQ ID NO: 68006 - DNA, 22 bp, Artificial Sequence
  chemically synthesized
tgataatgagtaagttctcccg

SEQ ID NO: 68007 - DNA, 22 bp, Artificial Sequence
  chemically synthesized
tcccgctatgatttcccttgaa

SEQ ID NO: 68008 - DNA, 22 bp, Artificial Sequence
  chemically synthesized
ccgctatgatttcccttgaagg

SEQ ID NO: 68009 - DNA, 22 bp, Artificial Sequence
  chemically synthesized
tgatttcccttgaaggctgatt

SEQ ID NO: 68010 - DNA, 22 bp, Artificial Sequence
  chemically synthesized
cccttgaaggctgattattaaa

SEQ ID NO: 68011 - DNA, 22 bp, Artificial Sequence
  chemically synthesized
ccttgaaggctgattattaaaa

SEQ ID NO: 68012 - DNA, 22 bp, Artificial Sequence
  chemically synthesized
gaaggctgattattaaaaagag

SEQ ID NO: 68013 - DNA, 22 bp, Artificial Sequence
  chemically synthesized
aaggctgattattaaaaagagc

SEQ ID NO: 68014 - DNA, 22 bp, Artificial Sequence
  chemically synthesized
attattaaaaagagcttggcac

SEQ ID NO: 68015 - DNA, 22 bp, Artificial Sequence
  chemically synthesized
ttaaaaagagcttggcacctcc

SEQ ID NO: 68016 - DNA, 22 bp, Artificial Sequence
  chemically synthesized
aaaagagcttggcacctccctc

SEQ ID NO: 68017 - DNA, 22 bp, Artificial Sequence
  chemically synthesized
ggcacctccctctcttctctct

SEQ ID NO: 68018 - DNA, 22 bp, Artificial Sequence
  chemically synthesized
gcacctccctctcttctctctt

SEQ ID NO: 68019 - DNA, 22 bp, Artificial Sequence
  chemically synthesized
cctctcttctctcttgcttctt

SEQ ID NO: 68020 - DNA, 22 bp, Artificial Sequence
  chemically synthesized
tcttctctcttgcttcttctct

SEQ ID NO: 68021 - DNA, 22 bp, Artificial Sequence
  chemically synthesized
ttctctcttgcttcttctcttg

SEQ ID NO: 68022 - DNA, 22 bp, Artificial Sequence
  chemically synthesized
ctctcttgcttcttctcttgcc

SEQ ID NO: 68023 - DNA, 22 bp, Artificial Sequence
  chemically synthesized
tctcttgcttcttctcttgcca

SEQ ID NO: 68024 - DNA, 22 bp, Artificial Sequence
  chemically synthesized
tcttgcttcttctcttgccatg

SEQ ID NO: 68025 - DNA, 22 bp, Artificial Sequence
  chemically synthesized
ttgcttcttctcttgccatgtg

SEQ ID NO: 68026 - DNA, 22 bp, Artificial Sequence
  chemically synthesized
gcttcttctcttgccatgtgat

SEQ ID NO: 68027 - DNA, 22 bp, Artificial Sequence
  chemically synthesized
cttcttctcttgccatgtgatt

SEQ ID NO: 68028 - DNA, 22 bp, Artificial Sequence
  chemically synthesized
cttctcttgccatgtgattgat

SEQ ID NO: 68029 - DNA, 22 bp, Artificial Sequence
  chemically synthesized
ttctcttgccatgtgattgatc

SEQ ID NO: 68030 - DNA, 22 bp, Artificial Sequence
  chemically synthesized
ctcttgccatgtgattgatctc

SEQ ID NO: 68031 - DNA, 22 bp, Artificial Sequence
  chemically synthesized
tcttgccatgtgattgatctct

SEQ ID NO: 68032 - DNA, 22 bp, Artificial Sequence
  chemically synthesized
ttgccatgtgattgatctctgc

SEQ ID NO: 68033 - DNA, 22 bp, Artificial Sequence
  chemically synthesized
gccatgtgattgatctctgcac

SEQ ID NO: 68034 - DNA, 22 bp, Artificial Sequence
  chemically synthesized
ccatgtgattgatctctgcaca

SEQ ID NO: 68035 - DNA, 22 bp, Artificial Sequence
  chemically synthesized
atctctgcacatgtaggctccc

SEQ ID NO: 68036 - DNA, 22 bp, Artificial Sequence
  chemically synthesized
tgcacatgtaggctccccttca

SEQ ID NO: 68037 - DNA, 22 bp, Artificial Sequence
  chemically synthesized
cacatgtaggctccccttcacc

SEQ ID NO: 68038 - DNA, 22 bp, Artificial Sequence
  chemically synthesized
cccttcaccttctgccatcagt

SEQ ID NO: 68039 - DNA, 22 bp, Artificial Sequence
  chemically synthesized
caccttctgccatcagtgaaag

SEQ ID NO: 68040 - DNA, 22 bp, Artificial Sequence
  chemically synthesized
accttctgccatcagtgaaagc

SEQ ID NO: 68041 - DNA, 22 bp, Artificial Sequence
  chemically synthesized
ctgccatcagtgaaagcagctt

SEQ ID NO: 68042 - DNA, 22 bp, Artificial Sequence
  chemically synthesized
tgccatcagtgaaagcagctta

SEQ ID NO: 68043 - DNA, 22 bp, Artificial Sequence
  chemically synthesized
ccatcagtgaaagcagcttaag

SEQ ID NO: 68044 - DNA, 22 bp, Artificial Sequence
  chemically synthesized
aaggccctcaccagaagcagat

SEQ ID NO: 68045 - DNA, 22 bp, Artificial Sequence
  chemically synthesized
aggccctcaccagaagcagatg

SEQ ID NO: 68046 - DNA, 22 bp, Artificial Sequence
  chemically synthesized
accagaagcagatgctggtgcc

SEQ ID NO: 68047 - DNA, 22 bp, Artificial Sequence
  chemically synthesized
gtgccatgcttcctggagagct

SEQ ID NO: 68048 - DNA, 22 bp, Artificial Sequence
  chemically synthesized
cctggagagcttgcagaatcat

SEQ ID NO: 68049 - DNA, 22 bp, Artificial Sequence
  chemically synthesized
ctggagagcttgcagaatcatg

SEQ ID NO: 68050 - DNA, 22 bp, Artificial Sequence
  chemically synthesized
gagagcttgcagaatcatgagc

SEQ ID NO: 68051 - DNA, 22 bp, Artificial Sequence
  chemically synthesized
gcagaatcatgagctgaataaa

SEQ ID NO: 68052 - DNA, 22 bp, Artificial Sequence
  chemically synthesized
cagaatcatgagctgaataaat

SEQ ID NO: 68053 - DNA, 22 bp, Artificial Sequence
  chemically synthesized
aataaatcccttttccttgtaa

SEQ ID NO: 68054 - DNA, 22 bp, Artificial Sequence
  chemically synthesized
ttccttgtaaattactcacctt

SEQ ID NO: 68055 - DNA, 22 bp, Artificial Sequence
  chemically synthesized
tccttgtaaattactcaccttc

SEQ ID NO: 68056 - DNA, 22 bp, Artificial Sequence
  chemically synthesized
ccttgtaaattactcaccttca

SEQ ID NO: 68057 - DNA, 22 bp, Artificial Sequence
  chemically synthesized
cttgtaaattactcaccttcag

SEQ ID NO: 68058 - DNA, 22 bp, Artificial Sequence
  chemically synthesized
gtaaattactcaccttcaggta

SEQ ID NO: 68059 - DNA, 22 bp, Artificial Sequence
  chemically synthesized
taaattactcaccttcaggtat

SEQ ID NO: 68060 - DNA, 22 bp, Artificial Sequence
  chemically synthesized
ctcaccttcaggtattccttta

SEQ ID NO: 68061 - DNA, 22 bp, Artificial Sequence
  chemically synthesized
accttcaggtattcctttatat

SEQ ID NO: 68062 - DNA, 22 bp, Artificial Sequence
  chemically synthesized
caggtattcctttatatagcaa

SEQ ID NO: 68063 - DNA, 22 bp, Artificial Sequence
  chemically synthesized
aggtattcctttatatagcaac

SEQ ID NO: 68064 - DNA, 22 bp, Artificial Sequence
  chemically synthesized
ctttatatagcaacacaaaagg

SEQ ID NO: 68065 - DNA, 22 bp, Artificial Sequence
  chemically synthesized
tatatagcaacacaaaaggact

SEQ ID NO: 68066 - DNA, 22 bp, Artificial Sequence
  chemically synthesized
atatagcaacacaaaaggacta

SEQ ID NO: 68067 - DNA, 22 bp, Artificial Sequence
  chemically synthesized
tatagcaacacaaaaggactaa

SEQ ID NO: 68068 - DNA, 22 bp, Artificial Sequence
  chemically synthesized
agacagtggccttgacttttct

SEQ ID NO: 68069 - DNA, 22 bp, Artificial Sequence
  chemically synthesized
gacttttctctctctttaagaa

SEQ ID NO: 68070 - DNA, 22 bp, Artificial Sequence
  chemically synthesized
acttttctctctctttaagaag

SEQ ID NO: 68071 - DNA, 22 bp, Artificial Sequence
  chemically synthesized
ttctctctctttaagaagtgtt

SEQ ID NO: 68072 - DNA, 22 bp, Artificial Sequence
  chemically synthesized
tctctctctttaagaagtgttg

SEQ ID NO: 68073 - DNA, 22 bp, Artificial Sequence
  chemically synthesized
ctctctctttaagaagtgttgc

SEQ ID NO: 68074 - DNA, 22 bp, Artificial Sequence
  chemically synthesized
tctctctttaagaagtgttgcc

SEQ ID NO: 68075 - DNA, 22 bp, Artificial Sequence
  chemically synthesized
tctctttaagaagtgttgcctt

SEQ ID NO: 68076 - DNA, 22 bp, Artificial Sequence
  chemically synthesized
tctttaagaagtgttgcctttg

SEQ ID NO: 68077 - DNA, 22 bp, Artificial Sequence
  chemically synthesized
tttaagaagtgttgcctttgct

SEQ ID NO: 68078 - DNA, 22 bp, Artificial Sequence
  chemically synthesized
taagaagtgttgcctttgctca

SEQ ID NO: 68079 - DNA, 22 bp, Artificial Sequence
  chemically synthesized
aagaagtgttgcctttgctcac

SEQ ID NO: 68080 - DNA, 22 bp, Artificial Sequence
  chemically synthesized
agaagtgttgcctttgctcact

SEQ ID NO: 68081 - DNA, 22 bp, Artificial Sequence
  chemically synthesized
cctttgctcacttagtcatccc

SEQ ID NO: 68082 - DNA, 22 bp, Artificial Sequence
  chemically synthesized
tgctcacttagtcatcccttct

SEQ ID NO: 68083 - DNA, 22 bp, Artificial Sequence
  chemically synthesized
gctcacttagtcatcccttctg

SEQ ID NO: 68084 - DNA, 22 bp, Artificial Sequence
  chemically synthesized
ctcacttagtcatcccttctgc

SEQ ID NO: 68085 - DNA, 22 bp, Artificial Sequence
  chemically synthesized
acttagtcatcccttctgcctg

SEQ ID NO: 68086 - DNA, 22 bp, Artificial Sequence
  chemically synthesized
agtcatcccttctgcctgcatt

SEQ ID NO: 68087 - DNA, 22 bp, Artificial Sequence
  chemically synthesized
gtcatcccttctgcctgcattt

SEQ ID NO: 68088 - DNA, 22 bp, Artificial Sequence
  chemically synthesized
ctgcctgcatttgtagagcatc

SEQ ID NO: 68089 - DNA, 22 bp, Artificial Sequence
  chemically synthesized
tgcctgcatttgtagagcatct

SEQ ID NO: 68090 - DNA, 22 bp, Artificial Sequence
  chemically synthesized
cctgcatttgtagagcatctgg

SEQ ID NO: 68091 - DNA, 22 bp, Artificial Sequence
  chemically synthesized
catttgtagagcatctggatgg

SEQ ID NO: 68092 - DNA, 22 bp, Artificial Sequence
  chemically synthesized
gtagagcatctggatgggagat

SEQ ID NO: 68093 - DNA, 22 bp, Artificial Sequence
  chemically synthesized
tagagcatctggatgggagatt

SEQ ID NO: 68094 - DNA, 22 bp, Artificial Sequence
  chemically synthesized
gatgggagatttatataaccgt

SEQ ID NO: 68095 - DNA, 22 bp, Artificial Sequence
  chemically synthesized
atataaccgtcactcttgactt

SEQ ID NO: 68096 - DNA, 22 bp, Artificial Sequence
  chemically synthesized
tataaccgtcactcttgacttt

SEQ ID NO: 68097 - DNA, 22 bp, Artificial Sequence
  chemically synthesized
ttgactttcccagcaggcctat

SEQ ID NO: 68098 - DNA, 22 bp, Artificial Sequence
  chemically synthesized
gactttcccagcaggcctatgt

SEQ ID NO: 68099 - DNA, 22 bp, Artificial Sequence
  chemically synthesized
actttcccagcaggcctatgtc

SEQ ID NO: 68100 - DNA, 22 bp, Artificial Sequence
  chemically synthesized
tcccagcaggcctatgtcatag

SEQ ID NO: 68101 - DNA, 22 bp, Artificial Sequence
  chemically synthesized
cccagcaggcctatgtcatagg

SEQ ID NO: 68102 - DNA, 22 bp, Artificial Sequence
  chemically synthesized
ccagcaggcctatgtcataggt

SEQ ID NO: 68103 - DNA, 22 bp, Artificial Sequence
  chemically synthesized
tgtcataggtactgtggtctct

SEQ ID NO: 68104 - DNA, 22 bp, Artificial Sequence
  chemically synthesized
tggtctctacaatacagcagag

SEQ ID NO: 68105 - DNA, 22 bp, Artificial Sequence
  chemically synthesized
tacaatacagcagaggtatctg

SEQ ID NO: 68106 - DNA, 22 bp, Artificial Sequence
  chemically synthesized
caatacagcagaggtatctgag

SEQ ID NO: 68107 - DNA, 22 bp, Artificial Sequence
  chemically synthesized
aggctccgagaggttgagtgac

SEQ ID NO: 68108 - DNA, 22 bp, Artificial Sequence
  chemically synthesized
cgagaggttgagtgacttgctc

SEQ ID NO: 68109 - DNA, 22 bp, Artificial Sequence
  chemically synthesized
agtgacttgctcatggctgcac

SEQ ID NO: 68110 - DNA, 22 bp, Artificial Sequence
  chemically synthesized
gctcatggctgcacaaccagta

SEQ ID NO: 68111 - DNA, 22 bp, Artificial Sequence
  chemically synthesized
ctcatggctgcacaaccagtaa

SEQ ID NO: 68112 - DNA, 22 bp, Artificial Sequence
  chemically synthesized
atggctgcacaaccagtaaata

SEQ ID NO: 68113 - DNA, 22 bp, Artificial Sequence
  chemically synthesized
cacaaccagtaaatattggagc

SEQ ID NO: 68114 - DNA, 22 bp, Artificial Sequence
  chemically synthesized
gagctggaattcaggtccacgg

SEQ ID NO: 68115 - DNA, 22 bp, Artificial Sequence
  chemically synthesized
gaattcaggtccacggtttcct

SEQ ID NO: 68116 - DNA, 22 bp, Artificial Sequence
  chemically synthesized
aggtccacggtttcctggctcc

SEQ ID NO: 68117 - DNA, 22 bp, Artificial Sequence
  chemically synthesized
cctggctccaaagcccatgatt

SEQ ID NO: 68118 - DNA, 22 bp, Artificial Sequence
  chemically synthesized
ctggctccaaagcccatgattt

SEQ ID NO: 68119 - DNA, 22 bp, Artificial Sequence
  chemically synthesized
gctccaaagcccatgatttttt

SEQ ID NO: 68120 - DNA, 22 bp, Artificial Sequence
  chemically synthesized
caaagcccatgattttttccct

SEQ ID NO: 68121 - DNA, 22 bp, Artificial Sequence
  chemically synthesized
tttccctcaatttattctgact

SEQ ID NO: 68122 - DNA, 22 bp, Artificial Sequence
  chemically synthesized
ttccctcaatttattctgactg

SEQ ID NO: 68123 - DNA, 22 bp, Artificial Sequence
  chemically synthesized
tccctcaatttattctgactgg

SEQ ID NO: 68124 - DNA, 22 bp, Artificial Sequence
  chemically synthesized
ccctcaatttattctgactggg

SEQ ID NO: 68125 - DNA, 22 bp, Artificial Sequence
  chemically synthesized
cctcaatttattctgactgggg

SEQ ID NO: 68126 - DNA, 22 bp, Artificial Sequence
  chemically synthesized
aatttattctgactggggcatg

SEQ ID NO: 68127 - DNA, 22 bp, Artificial Sequence
  chemically synthesized
attctgactggggcatggggga

SEQ ID NO: 68128 - DNA, 22 bp, Artificial Sequence
  chemically synthesized
ttctgactggggcatgggggag

SEQ ID NO: 68129 - DNA, 22 bp, Artificial Sequence
  chemically synthesized
tgactggggcatgggggagggg

SEQ ID NO: 68130 - DNA, 22 bp, Artificial Sequence
  chemically synthesized
actggggcatgggggagggggt

SEQ ID NO: 68131 - DNA, 22 bp, Artificial Sequence
  chemically synthesized
gggcatgggggagggggtggcc

SEQ ID NO: 68132 - DNA, 22 bp, Artificial Sequence
  chemically synthesized
tgggcagggccaccaggagcga

SEQ ID NO: 68133 - DNA, 22 bp, Artificial Sequence
  chemically synthesized
gggcagggccaccaggagcgac

SEQ ID NO: 68134 - DNA, 22 bp, Artificial Sequence
  chemically synthesized
ggcagggccaccaggagcgacc

SEQ ID NO: 68135 - DNA, 22 bp, Artificial Sequence
  chemically synthesized
ggtgcaggtacagaggaaaacc

SEQ ID NO: 68136 - DNA, 22 bp, Artificial Sequence
  chemically synthesized
ttgtcgagtgtggcccgtagtt

SEQ ID NO: 68137 - DNA, 22 bp, Artificial Sequence
  chemically synthesized
tcgagtgtggcccgtagttccc

SEQ ID NO: 68138 - DNA, 22 bp, Artificial Sequence
  chemically synthesized
ccatttttgcctgaatggcaca

SEQ ID NO: 68139 - DNA, 22 bp, Artificial Sequence
  chemically synthesized
ttgcctgaatggcacatttgaa

SEQ ID NO: 68140 - DNA, 22 bp, Artificial Sequence
  chemically synthesized
tgcctgaatggcacatttgaaa

SEQ ID NO: 68141 - DNA, 22 bp, Artificial Sequence
  chemically synthesized
gcctgaatggcacatttgaaag

SEQ ID NO: 68142 - DNA, 22 bp, Artificial Sequence
  chemically synthesized
cctgaatggcacatttgaaagt

SEQ ID NO: 68143 - DNA, 22 bp, Artificial Sequence
  chemically synthesized
aatggcacatttgaaagtgtta

SEQ ID NO: 68144 - DNA, 22 bp, Artificial Sequence
  chemically synthesized
gaaagtgttatataaccatgtg

SEQ ID NO: 68145 - DNA, 22 bp, Artificial Sequence
  chemically synthesized
aaagtgttatataaccatgtga

SEQ ID NO: 68146 - DNA, 22 bp, Artificial Sequence
  chemically synthesized
tataaccatgtgaataataata

SEQ ID NO: 68147 - DNA, 22 bp, Artificial Sequence
  chemically synthesized
gcctatatgagttctttaattt

SEQ ID NO: 68148 - DNA, 22 bp, Artificial Sequence
  chemically synthesized
tatgagttctttaatttgcttt

SEQ ID NO: 68149 - DNA, 22 bp, Artificial Sequence
  chemically synthesized
tttaatttgctttttggtccgc

SEQ ID NO: 68150 - DNA, 22 bp, Artificial Sequence
  chemically synthesized
taatttgctttttggtccgcat

SEQ ID NO: 68151 - DNA, 22 bp, Artificial Sequence
  chemically synthesized
aatttgctttttggtccgcatt

SEQ ID NO: 68152 - DNA, 22 bp, Artificial Sequence
  chemically synthesized
atttgctttttggtccgcattt

SEQ ID NO: 68153 - DNA, 22 bp, Artificial Sequence
  chemically synthesized
gctttttggtccgcatttggta

SEQ ID NO: 68154 - DNA, 22 bp, Artificial Sequence
  chemically synthesized
ctttttggtccgcatttggtaa

SEQ ID NO: 68155 - DNA, 22 bp, Artificial Sequence
  chemically synthesized
tttggtccgcatttggtaactt

SEQ ID NO: 68156 - DNA, 22 bp, Artificial Sequence
  chemically synthesized
ttggtccgcatttggtaacttc

SEQ ID NO: 68157 - DNA, 22 bp, Artificial Sequence
  chemically synthesized
tggtccgcatttggtaacttct

SEQ ID NO: 68158 - DNA, 22 bp, Artificial Sequence
  chemically synthesized
ggtccgcatttggtaacttctt

SEQ ID NO: 68159 - DNA, 22 bp, Artificial Sequence
  chemically synthesized
gtccgcatttggtaacttcttt

SEQ ID NO: 68160 - DNA, 22 bp, Artificial Sequence
  chemically synthesized
ggtaacttctttatcatctact

SEQ ID NO: 68161 - DNA, 22 bp, Artificial Sequence
  chemically synthesized
gtaacttctttatcatctacta

SEQ ID NO: 68162 - DNA, 22 bp, Artificial Sequence
  chemically synthesized
ctttatcatctactatactctg

SEQ ID NO: 68163 - DNA, 22 bp, Artificial Sequence
  chemically synthesized
tttatcatctactatactctgt

SEQ ID NO: 68164 - DNA, 22 bp, Artificial Sequence
  chemically synthesized
tatcatctactatactctgttg

SEQ ID NO: 68165 - DNA, 22 bp, Artificial Sequence
  chemically synthesized
atcatctactatactctgttgt

SEQ ID NO: 68166 - DNA, 22 bp, Artificial Sequence
  chemically synthesized
tcatctactatactctgttgtg

SEQ ID NO: 68167 - DNA, 22 bp, Artificial Sequence
  chemically synthesized
ctatactctgttgtgtctcttt

SEQ ID NO: 68168 - DNA, 22 bp, Artificial Sequence
  chemically synthesized
tactctgttgtgtctcttttgt

SEQ ID NO: 68169 - DNA, 22 bp, Artificial Sequence
  chemically synthesized
tgttgtgtctcttttgttgtaa

SEQ ID NO: 68170 - DNA, 22 bp, Artificial Sequence
  chemically synthesized
ttgtgtctcttttgttgtaatt

SEQ ID NO: 68171 - DNA, 22 bp, Artificial Sequence
  chemically synthesized
tgtctcttttgttgtaatttgt

SEQ ID NO: 68172 - DNA, 22 bp, Artificial Sequence
  chemically synthesized
ttttgttgtaatttgtaagtag

SEQ ID NO: 68173 - DNA, 22 bp, Artificial Sequence
  chemically synthesized
ttgttgtaatttgtaagtaggg

SEQ ID NO: 68174 - DNA, 22 bp, Artificial Sequence
  chemically synthesized
tgttgtaatttgtaagtagggg

SEQ ID NO: 68175 - DNA, 22 bp, Artificial Sequence
  chemically synthesized
gttgtaatttgtaagtaggggt

SEQ ID NO: 68176 - DNA, 22 bp, Artificial Sequence
  chemically synthesized
ttgtaatttgtaagtaggggtg

SEQ ID NO: 68177 - DNA, 22 bp, Artificial Sequence
  chemically synthesized
taatttgtaagtaggggtgaga

SEQ ID NO: 68178 - DNA, 22 bp, Artificial Sequence
  chemically synthesized
gtaagtaggggtgagataaagt

SEQ ID NO: 68179 - DNA, 22 bp, Artificial Sequence
  chemically synthesized
taagtaggggtgagataaagta

SEQ ID NO: 68180 - DNA, 22 bp, Artificial Sequence
  chemically synthesized
gggtttgctgggtttcttccat

SEQ ID NO: 68181 - DNA, 22 bp, Artificial Sequence
  chemically synthesized
gctgggtttcttccatgtcatc

SEQ ID NO: 68182 - DNA, 22 bp, Artificial Sequence
  chemically synthesized
ctgggtttcttccatgtcatca

SEQ ID NO: 68183 - DNA, 22 bp, Artificial Sequence
  chemically synthesized
ggtttcttccatgtcatcatgt

SEQ ID NO: 68184 - DNA, 22 bp, Artificial Sequence
  chemically synthesized
cttccatgtcatcatgttcctc

SEQ ID NO: 68185 - DNA, 22 bp, Artificial Sequence
  chemically synthesized
ttccatgtcatcatgttcctcc

SEQ ID NO: 68186 - DNA, 22 bp, Artificial Sequence
  chemically synthesized
ccatgtcatcatgttcctcctt

SEQ ID NO: 68187 - DNA, 22 bp, Artificial Sequence
  chemically synthesized
catgtcatcatgttcctccttg

SEQ ID NO: 68188 - DNA, 22 bp, Artificial Sequence
  chemically synthesized
ctccttgcatggggccaggatc

SEQ ID NO: 68189 - DNA, 22 bp, Artificial Sequence
  chemically synthesized
cttgcatggggccaggatccgt

SEQ ID NO: 68190 - DNA, 22 bp, Artificial Sequence
  chemically synthesized
gcatggggccaggatccgtgga

SEQ ID NO: 68191 - DNA, 22 bp, Artificial Sequence
  chemically synthesized
catggggccaggatccgtggag

SEQ ID NO: 68192 - DNA, 22 bp, Artificial Sequence
  chemically synthesized
cctggcacctacgtggtggtgc

SEQ ID NO: 68193 - DNA, 22 bp, Artificial Sequence
  chemically synthesized
gcacctacgtggtggtgctgaa

SEQ ID NO: 68194 - DNA, 22 bp, Artificial Sequence
  chemically synthesized
cgtggtggtgctgaaggaggag

SEQ ID NO: 68195 - DNA, 22 bp, Artificial Sequence
  chemically synthesized
aaggaggagacccacctctcgc

SEQ ID NO: 68196 - DNA, 22 bp, Artificial Sequence
  chemically synthesized
tcgcagtcagagcgcactgccc

SEQ ID NO: 68197 - DNA, 22 bp, Artificial Sequence
  chemically synthesized
gcagtcagagcgcactgcccgc

SEQ ID NO: 68198 - DNA, 22 bp, Artificial Sequence
  chemically synthesized
cccgccgcctgcaggcccaggc

SEQ ID NO: 68199 - DNA, 22 bp, Artificial Sequence
  chemically synthesized
caggcccaggctgcccgccggg

SEQ ID NO: 68200 - DNA, 22 bp, Artificial Sequence
  chemically synthesized
cccgccggggatacctcaccaa

SEQ ID NO: 68201 - DNA, 22 bp, Artificial Sequence
  chemically synthesized
accaagatcctgcatgtcttcc

SEQ ID NO: 68202 - DNA, 22 bp, Artificial Sequence
  chemically synthesized
catgtcttccatggccttcttc

SEQ ID NO: 68203 - DNA, 22 bp, Artificial Sequence
  chemically synthesized
ccatggccttcttcctggcttc

SEQ ID NO: 68204 - DNA, 22 bp, Artificial Sequence
  chemically synthesized
catggccttcttcctggcttcc

SEQ ID NO: 68205 - DNA, 22 bp, Artificial Sequence
  chemically synthesized
cttcctggcttcctggtgaaga

SEQ ID NO: 68206 - DNA, 22 bp, Artificial Sequence
  chemically synthesized
ttcctggcttcctggtgaagat

SEQ ID NO: 68207 - DNA, 22 bp, Artificial Sequence
  chemically synthesized
cctggcttcctggtgaagatga

SEQ ID NO: 68208 - DNA, 22 bp, Artificial Sequence
  chemically synthesized
ctggcttcctggtgaagatgag

SEQ ID NO: 68209 - DNA, 22 bp, Artificial Sequence
  chemically synthesized
gcttcctggtgaagatgagtgg

SEQ ID NO: 68210 - DNA, 22 bp, Artificial Sequence
  chemically synthesized
cctggtgaagatgagtggcgac

SEQ ID NO: 68211 - DNA, 22 bp, Artificial Sequence
  chemically synthesized
ctggtgaagatgagtggcgacc

SEQ ID NO: 68212 - DNA, 22 bp, Artificial Sequence
  chemically synthesized
gtgaagatgagtggcgacctgc

SEQ ID NO: 68213 - DNA, 22 bp, Artificial Sequence
  chemically synthesized
ctggagctggtgagccaccctt

SEQ ID NO: 68214 - DNA, 22 bp, Artificial Sequence
  chemically synthesized
gagctggtgagccacccttttt

SEQ ID NO: 68215 - DNA, 22 bp, Artificial Sequence
  chemically synthesized
gtgagccaccctttttgggaat

SEQ ID NO: 68216 - DNA, 22 bp, Artificial Sequence
  chemically synthesized
tttgggaatggcacttcctgat

SEQ ID NO: 68217 - DNA, 22 bp, Artificial Sequence
  chemically synthesized
ttgggaatggcacttcctgata

SEQ ID NO: 68218 - DNA, 22 bp, Artificial Sequence
  chemically synthesized
tgggaatggcacttcctgatag

SEQ ID NO: 68219 - DNA, 22 bp, Artificial Sequence
  chemically synthesized
gggaatggcacttcctgatagg

SEQ ID NO: 68220 - DNA, 22 bp, Artificial Sequence
  chemically synthesized
ggaatggcacttcctgataggg

SEQ ID NO: 68221 - DNA, 22 bp, Artificial Sequence
  chemically synthesized
cctgatagggctgggccactgc

SEQ ID NO: 68222 - DNA, 22 bp, Artificial Sequence
  chemically synthesized
ctgatagggctgggccactgca

SEQ ID NO: 68223 - DNA, 22 bp, Artificial Sequence
  chemically synthesized
atagggctgggccactgcatat

SEQ ID NO: 68224 - DNA, 22 bp, Artificial Sequence
  chemically synthesized
ggccactgcatatacactgggg

SEQ ID NO: 68225 - DNA, 22 bp, Artificial Sequence
  chemically synthesized
catatacactggggactgtgct

SEQ ID NO: 68226 - DNA, 22 bp, Artificial Sequence
  chemically synthesized
gggactgtgcttagtaggccca

SEQ ID NO: 68227 - DNA, 22 bp, Artificial Sequence
  chemically synthesized
tgcttagtaggcccattgctga

SEQ ID NO: 68228 - DNA, 22 bp, Artificial Sequence
  chemically synthesized
agtaggcccattgctgaaaatc

SEQ ID NO: 68229 - DNA, 22 bp, Artificial Sequence
  chemically synthesized
gtaggcccattgctgaaaatca

SEQ ID NO: 68230 - DNA, 22 bp, Artificial Sequence
  chemically synthesized
ctgaaaatcagaaggggacagc

SEQ ID NO: 68231 - DNA, 22 bp, Artificial Sequence
  chemically synthesized
aaaatcagaaggggacagcaag

SEQ ID NO: 68232 - DNA, 22 bp, Artificial Sequence
  chemically synthesized
agcacttatcgggtaccaagca

SEQ ID NO: 68233 - DNA, 22 bp, Artificial Sequence
  chemically synthesized
atcgggtaccaagcacagtaac

SEQ ID NO: 68234 - DNA, 22 bp, Artificial Sequence
  chemically synthesized
tcgggtaccaagcacagtaact

SEQ ID NO: 68235 - DNA, 22 bp, Artificial Sequence
  chemically synthesized
ctggctttctgtatagaattcc

SEQ ID NO: 68236 - DNA, 22 bp, Artificial Sequence
  chemically synthesized
gctttctgtatagaattccctt

SEQ ID NO: 68237 - DNA, 22 bp, Artificial Sequence
  chemically synthesized
tctgtatagaattccctttaag

SEQ ID NO: 68238 - DNA, 22 bp, Artificial Sequence
  chemically synthesized
ctgtatagaattccctttaagc

SEQ ID NO: 68239 - DNA, 22 bp, Artificial Sequence
  chemically synthesized
tgtatagaattccctttaagcc

SEQ ID NO: 68240 - DNA, 22 bp, Artificial Sequence
  chemically synthesized
tatagaattccctttaagcctg

SEQ ID NO: 68241 - DNA, 22 bp, Artificial Sequence
  chemically synthesized
cctttaagcctggccatgcccc

SEQ ID NO: 68242 - DNA, 22 bp, Artificial Sequence
  chemically synthesized
taagcctggccatgccccagtg

SEQ ID NO: 68243 - DNA, 22 bp, Artificial Sequence
  chemically synthesized
aagcctggccatgccccagtgg

SEQ ID NO: 68244 - DNA, 22 bp, Artificial Sequence
  chemically synthesized
agcctggccatgccccagtggt

SEQ ID NO: 68245 - DNA, 22 bp, Artificial Sequence
  chemically synthesized
gccatgccccagtggtacgtct

SEQ ID NO: 68246 - DNA, 22 bp, Artificial Sequence
  chemically synthesized
tcttcatttgaaagacgaggag

SEQ ID NO: 68247 - DNA, 22 bp, Artificial Sequence
  chemically synthesized
catttgaaagacgaggagactg

SEQ ID NO: 68248 - DNA, 22 bp, Artificial Sequence
  chemically synthesized
atttgaaagacgaggagactga

SEQ ID NO: 68249 - DNA, 22 bp, Artificial Sequence
  chemically synthesized
gaaagacgaggagactgaagtt

SEQ ID NO: 68250 - DNA, 22 bp, Artificial Sequence
  chemically synthesized
aaagacgaggagactgaagttc

SEQ ID NO: 68251 - DNA, 22 bp, Artificial Sequence
  chemically synthesized
aagttcagaggggaccacacag

SEQ ID NO: 68252 - DNA, 22 bp, Artificial Sequence
  chemically synthesized
agaggggaccacacagacagct

SEQ ID NO: 68253 - DNA, 22 bp, Artificial Sequence
  chemically synthesized
ggggtagagcctggatcaaacc

SEQ ID NO: 68254 - DNA, 22 bp, Artificial Sequence
  chemically synthesized
gatcaaacccattggtctgcct

SEQ ID NO: 68255 - DNA, 22 bp, Artificial Sequence
  chemically synthesized
gtctgcctgccagccattcttg

SEQ ID NO: 68256 - DNA, 22 bp, Artificial Sequence
  chemically synthesized
cctgccagccattcttgtgcca

SEQ ID NO: 68257 - DNA, 22 bp, Artificial Sequence
  chemically synthesized
ccagccattcttgtgccaatgc

SEQ ID NO: 68258 - DNA, 22 bp, Artificial Sequence
  chemically synthesized
ttgtgccaatgcatctgctgcc

SEQ ID NO: 68259 - DNA, 22 bp, Artificial Sequence
  chemically synthesized
gtgccaatgcatctgctgccta

SEQ ID NO: 68260 - DNA, 22 bp, Artificial Sequence
  chemically synthesized
tgccaatgcatctgctgcctac

SEQ ID NO: 68261 - DNA, 22 bp, Artificial Sequence
  chemically synthesized
ctgcctacggaaacctgtaggg

SEQ ID NO: 68262 - DNA, 22 bp, Artificial Sequence
  chemically synthesized
cctacggaaacctgtagggaca

SEQ ID NO: 68263 - DNA, 22 bp, Artificial Sequence
  chemically synthesized
cggaaacctgtagggacaaggc

SEQ ID NO: 68264 - DNA, 22 bp, Artificial Sequence
  chemically synthesized
tagggacaaggccctgggatgt

SEQ ID NO: 68265 - DNA, 22 bp, Artificial Sequence
  chemically synthesized
ggatgttcagtggagcctgagt

SEQ ID NO: 68266 - DNA, 22 bp, Artificial Sequence
  chemically synthesized
agtggagcctgagtcattttat

SEQ ID NO: 68267 - DNA, 22 bp, Artificial Sequence
  chemically synthesized
agtcattttataaaaaagcatg

SEQ ID NO: 68268 - DNA, 22 bp, Artificial Sequence
  chemically synthesized
tataaaaaagcatgactctagg

SEQ ID NO: 68269 - DNA, 22 bp, Artificial Sequence
  chemically synthesized
ataaaaaagcatgactctaggg

SEQ ID NO: 68270 - DNA, 22 bp, Artificial Sequence
  chemically synthesized
taaaaaagcatgactctagggt

SEQ ID NO: 68271 - DNA, 22 bp, Artificial Sequence
  chemically synthesized
tagggtccaaaattcctttgaa

SEQ ID NO: 68272 - DNA, 22 bp, Artificial Sequence
  chemically synthesized
gggtccaaaattcctttgaagc

SEQ ID NO: 68273 - DNA, 22 bp, Artificial Sequence
  chemically synthesized
ctttgaagctgttgctatccag

SEQ ID NO: 68274 - DNA, 22 bp, Artificial Sequence
  chemically synthesized
tgaagctgttgctatccagagt

SEQ ID NO: 68275 - DNA, 22 bp, Artificial Sequence
  chemically synthesized
gaagctgttgctatccagagtg

SEQ ID NO: 68276 - DNA, 22 bp, Artificial Sequence
  chemically synthesized
aagctgttgctatccagagtga

SEQ ID NO: 68277 - DNA, 22 bp, Artificial Sequence
  chemically synthesized
ttgctatccagagtgaagtccc

SEQ ID NO: 68278 - DNA, 22 bp, Artificial Sequence
  chemically synthesized
ctatccagagtgaagtcccttc

SEQ ID NO: 68279 - DNA, 22 bp, Artificial Sequence
  chemically synthesized
tccagagtgaagtcccttcttt

SEQ ID NO: 68280 - DNA, 22 bp, Artificial Sequence
  chemically synthesized
ctttaggacagggtggccctcc

SEQ ID NO: 68281 - DNA, 22 bp, Artificial Sequence
  chemically synthesized
tttaggacagggtggccctcct

SEQ ID NO: 68282 - DNA, 22 bp, Artificial Sequence
  chemically synthesized
taggacagggtggccctcctcc

SEQ ID NO: 68283 - DNA, 22 bp, Artificial Sequence
  chemically synthesized
aggacagggtggccctcctccc

SEQ ID NO: 68284 - DNA, 22 bp, Artificial Sequence
  chemically synthesized
ggacagggtggccctcctccct

SEQ ID NO: 68285 - DNA, 22 bp, Artificial Sequence
  chemically synthesized
ctccctcctggatgtcacatct

SEQ ID NO: 68286 - DNA, 22 bp, Artificial Sequence
  chemically synthesized
cctcctggatgtcacatcttcg

SEQ ID NO: 68287 - DNA, 22 bp, Artificial Sequence
  chemically synthesized
ctggatgtcacatcttcggtgg

SEQ ID NO: 68288 - DNA, 22 bp, Artificial Sequence
  chemically synthesized
gatgtcacatcttcggtggagg

SEQ ID NO: 68289 - DNA, 22 bp, Artificial Sequence
  chemically synthesized
cggtggaggggcagaaagggga

SEQ ID NO: 68290 - DNA, 22 bp, Artificial Sequence
  chemically synthesized
ggtggaggggcagaaaggggac

SEQ ID NO: 68291 - DNA, 22 bp, Artificial Sequence
  chemically synthesized
ggtattctcctcaccctggccc

SEQ ID NO: 68292 - DNA, 22 bp, Artificial Sequence
  chemically synthesized
tcctcaccctggccctagtgct

SEQ ID NO: 68293 - DNA, 22 bp, Artificial Sequence
  chemically synthesized
ctcaccctggccctagtgcttc

SEQ ID NO: 68294 - DNA, 22 bp, Artificial Sequence
  chemically synthesized
accctggccctagtgcttcaaa

SEQ ID NO: 68295 - DNA, 22 bp, Artificial Sequence
  chemically synthesized
gccctagtgcttcaaatcttaa

SEQ ID NO: 68296 - DNA, 22 bp, Artificial Sequence
  chemically synthesized
gtgcttcaaatcttaaaaaaac

SEQ ID NO: 68297 - DNA, 22 bp, Artificial Sequence
  chemically synthesized
caaatcttaaaaaaacgttttt

SEQ ID NO: 68298 - DNA, 22 bp, Artificial Sequence
  chemically synthesized
aaatcttaaaaaaacgttttta

SEQ ID NO: 68299 - DNA, 22 bp, Artificial Sequence
  chemically synthesized
aaaaaaacgtttttatttgtgc

SEQ ID NO: 68300 - DNA, 22 bp, Artificial Sequence
  chemically synthesized
aaaaaacgtttttatttgtgct

SEQ ID NO: 68301 - DNA, 22 bp, Artificial Sequence
  chemically synthesized
ttatttgtgcttctgcaccacc

SEQ ID NO: 68302 - DNA, 22 bp, Artificial Sequence
  chemically synthesized
tatttgtgcttctgcaccacct

SEQ ID NO: 68303 - DNA, 22 bp, Artificial Sequence
  chemically synthesized
atttgtgcttctgcaccacctt

SEQ ID NO: 68304 - DNA, 22 bp, Artificial Sequence
  chemically synthesized
tttgtgcttctgcaccaccttc

SEQ ID NO: 68305 - DNA, 22 bp, Artificial Sequence
  chemically synthesized
gtgcttctgcaccaccttctag

SEQ ID NO: 68306 - DNA, 22 bp, Artificial Sequence
  chemically synthesized
tgcttctgcaccaccttctagc

SEQ ID NO: 68307 - DNA, 22 bp, Artificial Sequence
  chemically synthesized
gaaggtggtgcagaagcacaaa

SEQ ID NO: 68308 - DNA, 22 bp, Artificial Sequence
  chemically synthesized
ttttaagatttgaagcactagg

SEQ ID NO: 68309 - DNA, 22 bp, Artificial Sequence
  chemically synthesized
tttaagatttgaagcactaggg

SEQ ID NO: 68310 - DNA, 22 bp, Artificial Sequence
  chemically synthesized
ttaagatttgaagcactagggc

SEQ ID NO: 68311 - DNA, 22 bp, Artificial Sequence
  chemically synthesized
taagatttgaagcactagggcc

SEQ ID NO: 68312 - DNA, 22 bp, Artificial Sequence
  chemically synthesized
aagatttgaagcactagggcca

SEQ ID NO: 68313 - DNA, 22 bp, Artificial Sequence
  chemically synthesized
agatttgaagcactagggccag

SEQ ID NO: 68314 - DNA, 22 bp, Artificial Sequence
  chemically synthesized
gaagcactagggccagggtgag

SEQ ID NO: 68315 - DNA, 22 bp, Artificial Sequence
  chemically synthesized
aagcactagggccagggtgagg

SEQ ID NO: 68316 - DNA, 22 bp, Artificial Sequence
  chemically synthesized
gggccagggtgaggagaatacc

SEQ ID NO: 68317 - DNA, 22 bp, Artificial Sequence
  chemically synthesized
tctgcccctccaccgaagatgt

SEQ ID NO: 68318 - DNA, 22 bp, Artificial Sequence
  chemically synthesized
ctgcccctccaccgaagatgtg

SEQ ID NO: 68319 - DNA, 22 bp, Artificial Sequence
  chemically synthesized
tgcccctccaccgaagatgtga

SEQ ID NO: 68320 - DNA, 22 bp, Artificial Sequence
  chemically synthesized
cccctccaccgaagatgtgaca

SEQ ID NO: 68321 - DNA, 22 bp, Artificial Sequence
  chemically synthesized
caccgaagatgtgacatccagg

SEQ ID NO: 68322 - DNA, 22 bp, Artificial Sequence
  chemically synthesized
tcctaaagaagggacttcactc

SEQ ID NO: 68323 - DNA, 22 bp, Artificial Sequence
  chemically synthesized
aagaagggacttcactctggat

SEQ ID NO: 68324 - DNA, 22 bp, Artificial Sequence
  chemically synthesized
cactctggatagcaacagcttc

SEQ ID NO: 68325 - DNA, 22 bp, Artificial Sequence
  chemically synthesized
actctggatagcaacagcttca

SEQ ID NO: 68326 - DNA, 22 bp, Artificial Sequence
  chemically synthesized
tggatagcaacagcttcaaagg

SEQ ID NO: 68327 - DNA, 22 bp, Artificial Sequence
  chemically synthesized
gatagcaacagcttcaaaggaa

SEQ ID NO: 68328 - DNA, 22 bp, Artificial Sequence
  chemically synthesized
caaaggaattttggaccctaga

SEQ ID NO: 68329 - DNA, 22 bp, Artificial Sequence
  chemically synthesized
aaaggaattttggaccctagag

SEQ ID NO: 68330 - DNA, 22 bp, Artificial Sequence
  chemically synthesized
tggaccctagagtcatgctttt

SEQ ID NO: 68331 - DNA, 22 bp, Artificial Sequence
  chemically synthesized
ggaccctagagtcatgcttttt

SEQ ID NO: 68332 - DNA, 22 bp, Artificial Sequence
  chemically synthesized
gaccctagagtcatgctttttt

SEQ ID NO: 68333 - DNA, 22 bp, Artificial Sequence
  chemically synthesized
gagtcatgcttttttataaaat

SEQ ID NO: 68334 - DNA, 22 bp, Artificial Sequence
  chemically synthesized
ttttataaaatgactcaggctc

SEQ ID NO: 68335 - DNA, 22 bp, Artificial Sequence
  chemically synthesized
tttataaaatgactcaggctcc

SEQ ID NO: 68336 - DNA, 22 bp, Artificial Sequence
  chemically synthesized
ttataaaatgactcaggctcca

SEQ ID NO: 68337 - DNA, 22 bp, Artificial Sequence
  chemically synthesized
tataaaatgactcaggctccac

SEQ ID NO: 68338 - DNA, 22 bp, Artificial Sequence
  chemically synthesized
ataaaatgactcaggctccact

SEQ ID NO: 68339 - DNA, 22 bp, Artificial Sequence
  chemically synthesized
taaaatgactcaggctccactg

SEQ ID NO: 68340 - DNA, 22 bp, Artificial Sequence
  chemically synthesized
aggctccactgaacatcccagg

SEQ ID NO: 68341 - DNA, 22 bp, Artificial Sequence
  chemically synthesized
cactgaacatcccagggccttg

SEQ ID NO: 68342 - DNA, 22 bp, Artificial Sequence
  chemically synthesized
aacatcccagggccttgtccct

SEQ ID NO: 68343 - DNA, 22 bp, Artificial Sequence
  chemically synthesized
gtccctacaggtttccgtaggc

SEQ ID NO: 68344 - DNA, 22 bp, Artificial Sequence
  chemically synthesized
tccctacaggtttccgtaggca

SEQ ID NO: 68345 - DNA, 22 bp, Artificial Sequence
  chemically synthesized
caggtttccgtaggcagcagat

SEQ ID NO: 68346 - DNA, 22 bp, Artificial Sequence
  chemically synthesized
ccgtaggcagcagatgcattgg

SEQ ID NO: 68347 - DNA, 22 bp, Artificial Sequence
  chemically synthesized
cgtaggcagcagatgcattggc

SEQ ID NO: 68348 - DNA, 22 bp, Artificial Sequence
  chemically synthesized
gcacaagaatggctggcaggca

SEQ ID NO: 68349 - DNA, 22 bp, Artificial Sequence
  chemically synthesized
gcaggcagaccaatgggtttga

SEQ ID NO: 68350 - DNA, 22 bp, Artificial Sequence
  chemically synthesized
gatccaggctctacccctagct

SEQ ID NO: 68351 - DNA, 22 bp, Artificial Sequence
  chemically synthesized
atccaggctctacccctagctg

SEQ ID NO: 68352 - DNA, 22 bp, Artificial Sequence
  chemically synthesized
tacccctagctgtctgtgtggt

SEQ ID NO: 68353 - DNA, 22 bp, Artificial Sequence
  chemically synthesized
cccctagctgtctgtgtggtcc

SEQ ID NO: 68354 - DNA, 22 bp, Artificial Sequence
  chemically synthesized
gctgtctgtgtggtcccctctg

SEQ ID NO: 68355 - DNA, 22 bp, Artificial Sequence
  chemically synthesized
tctgtgtggtcccctctgaact

SEQ ID NO: 68356 - DNA, 22 bp, Artificial Sequence
  chemically synthesized
tgtggtcccctctgaacttcag

SEQ ID NO: 68357 - DNA, 22 bp, Artificial Sequence
  chemically synthesized
tgaacttcagtctcctcgtctt

SEQ ID NO: 68358 - DNA, 22 bp, Artificial Sequence
  chemically synthesized
aacttcagtctcctcgtctttc

SEQ ID NO: 68359 - DNA, 22 bp, Artificial Sequence
  chemically synthesized
cagtctcctcgtctttcaaatg

SEQ ID NO: 68360 - DNA, 22 bp, Artificial Sequence
  chemically synthesized
agtctcctcgtctttcaaatga

SEQ ID NO: 68361 - DNA, 22 bp, Artificial Sequence
  chemically synthesized
ctcgtctttcaaatgaagatag

SEQ ID NO: 68362 - DNA, 22 bp, Artificial Sequence
  chemically synthesized
gtctttcaaatgaagatagacg

SEQ ID NO: 68363 - DNA, 22 bp, Artificial Sequence
  chemically synthesized
tcaaatgaagatagacgtacca

SEQ ID NO: 68364 - DNA, 22 bp, Artificial Sequence
  chemically synthesized
caaatgaagatagacgtaccac

SEQ ID NO: 68365 - DNA, 22 bp, Artificial Sequence
  chemically synthesized
aaatgaagatagacgtaccact

SEQ ID NO: 68366 - DNA, 22 bp, Artificial Sequence
  chemically synthesized
gggcatggccaggcttaaaggg

SEQ ID NO: 68367 - DNA, 22 bp, Artificial Sequence
  chemically synthesized
aaagggaattctatacagaaag

SEQ ID NO: 68368 - DNA, 22 bp, Artificial Sequence
  chemically synthesized
aagggaattctatacagaaagc

SEQ ID NO: 68369 - DNA, 22 bp, Artificial Sequence
  chemically synthesized
tatacagaaagccagtagttac

SEQ ID NO: 68370 - DNA, 22 bp, Artificial Sequence
  chemically synthesized
tacagaaagccagtagttactg

SEQ ID NO: 68371 - DNA, 22 bp, Artificial Sequence
  chemically synthesized
ctgtgcttggtacccgataagt

SEQ ID NO: 68372 - DNA, 22 bp, Artificial Sequence
  chemically synthesized
tgcttggtacccgataagtgct

SEQ ID NO: 68373 - DNA, 22 bp, Artificial Sequence
  chemically synthesized
ggtacccgataagtgctcaata

SEQ ID NO: 68374 - DNA, 22 bp, Artificial Sequence
  chemically synthesized
gtacccgataagtgctcaatac

SEQ ID NO: 68375 - DNA, 22 bp, Artificial Sequence
  chemically synthesized
aatacatacttgctgtcccctt

SEQ ID NO: 68376 - DNA, 22 bp, Artificial Sequence
  chemically synthesized
gctgtccccttctgattttcag

SEQ ID NO: 68377 - DNA, 22 bp, Artificial Sequence
  chemically synthesized
ctgtccccttctgattttcagc

SEQ ID NO: 68378 - DNA, 22 bp, Artificial Sequence
  chemically synthesized
tccccttctgattttcagcaat

SEQ ID NO: 68379 - DNA, 22 bp, Artificial Sequence
  chemically synthesized
ctgattttcagcaatgggccta

SEQ ID NO: 68380 - DNA, 22 bp, Artificial Sequence
  chemically synthesized
tgattttcagcaatgggcctac

SEQ ID NO: 68381 - DNA, 22 bp, Artificial Sequence
  chemically synthesized
attttcagcaatgggcctacta

SEQ ID NO: 68382 - DNA, 22 bp, Artificial Sequence
  chemically synthesized
tcagcaatgggcctactaagca

SEQ ID NO: 68383 - DNA, 22 bp, Artificial Sequence
  chemically synthesized
cagcaatgggcctactaagcac

SEQ ID NO: 68384 - DNA, 22 bp, Artificial Sequence
  chemically synthesized
agcaatgggcctactaagcaca

SEQ ID NO: 68385 - DNA, 22 bp, Artificial Sequence
  chemically synthesized
ctaagcacagtccccagtgtat

SEQ ID NO: 68386 - DNA, 22 bp, Artificial Sequence
  chemically synthesized
agcacagtccccagtgtatatg

SEQ ID NO: 68387 - DNA, 22 bp, Artificial Sequence
  chemically synthesized
tcaggaagtgccattcccaaaa

SEQ ID NO: 68388 - DNA, 22 bp, Artificial Sequence
  chemically synthesized
ccaaaaagggtggctcaccagc

SEQ ID NO: 68389 - DNA, 22 bp, Artificial Sequence
  chemically synthesized
accagctccagcaggtcgccac

SEQ ID NO: 68390 - DNA, 22 bp, Artificial Sequence
  chemically synthesized
cagcaggtcgccactcatcttc

SEQ ID NO: 68391 - DNA, 22 bp, Artificial Sequence
  chemically synthesized
atcttcaccaggaagccaggaa

SEQ ID NO: 68392 - DNA, 22 bp, Artificial Sequence
  chemically synthesized
caccaggaagccaggaagaagg

SEQ ID NO: 68393 - DNA, 22 bp, Artificial Sequence
  chemically synthesized
accaggaagccaggaagaaggc

SEQ ID NO: 68394 - DNA, 22 bp, Artificial Sequence
  chemically synthesized
ggtgaggtatccccggcgggca

SEQ ID NO: 68395 - DNA, 22 bp, Artificial Sequence
  chemically synthesized
gtgaggtatccccggcgggcag

SEQ ID NO: 68396 - DNA, 22 bp, Artificial Sequence
  chemically synthesized
ggcctgcaggcggcgggcagtg

SEQ ID NO: 68397 - DNA, 22 bp, Artificial Sequence
  chemically synthesized
caggcggcgggcagtgcgctct

SEQ ID NO: 68398 - DNA, 22 bp, Artificial Sequence
  chemically synthesized
tgactgcgagaggtgggtctcc

SEQ ID NO: 68399 - DNA, 22 bp, Artificial Sequence
  chemically synthesized
actgcgagaggtgggtctcctc

SEQ ID NO: 68400 - DNA, 22 bp, Artificial Sequence
  chemically synthesized
cgagaggtgggtctcctccttc

SEQ ID NO: 68401 - DNA, 22 bp, Artificial Sequence
  chemically synthesized
ctccttcagcaccaccacgtag

SEQ ID NO: 68402 - DNA, 22 bp, Artificial Sequence
  chemically synthesized
cttcagcaccaccacgtaggtg

SEQ ID NO: 68403 - DNA, 22 bp, Artificial Sequence
  chemically synthesized
cagcaccaccacgtaggtgcca

SEQ ID NO: 68404 - DNA, 22 bp, Artificial Sequence
  chemically synthesized
agcaccaccacgtaggtgccag

SEQ ID NO: 68405 - DNA, 22 bp, Artificial Sequence
  chemically synthesized
cacggatcctggccccatgcaa

SEQ ID NO: 68406 - DNA, 22 bp, Artificial Sequence
  chemically synthesized
gccccatgcaaggaggaacatg

SEQ ID NO: 68407 - DNA, 22 bp, Artificial Sequence
  chemically synthesized
ggtgtactttatctcaccccta

SEQ ID NO: 68408 - DNA, 22 bp, Artificial Sequence
  chemically synthesized
tatctcacccctacttacaaat

SEQ ID NO: 68409 - DNA, 22 bp, Artificial Sequence
  chemically synthesized
atctcacccctacttacaaatt

SEQ ID NO: 68410 - DNA, 22 bp, Artificial Sequence
  chemically synthesized
tctcacccctacttacaaatta

SEQ ID NO: 68411 - DNA, 22 bp, Artificial Sequence
  chemically synthesized
acccctacttacaaattacaac

SEQ ID NO: 68412 - DNA, 22 bp, Artificial Sequence
  chemically synthesized
cttacaaattacaacaaaagag

SEQ ID NO: 68413 - DNA, 22 bp, Artificial Sequence
  chemically synthesized
acaaattacaacaaaagagaca

SEQ ID NO: 68414 - DNA, 22 bp, Artificial Sequence
  chemically synthesized
caaattacaacaaaagagacac

SEQ ID NO: 68415 - DNA, 22 bp, Artificial Sequence
  chemically synthesized
caacaaaagagacacaacagag

SEQ ID NO: 68416 - DNA, 22 bp, Artificial Sequence
  chemically synthesized
ccaaatgcggaccaaaaagcaa

SEQ ID NO: 68417 - DNA, 22 bp, Artificial Sequence
  chemically synthesized
aagaactcatataggccaacta

SEQ ID NO: 68418 - DNA, 22 bp, Artificial Sequence
  chemically synthesized
atataggccaactattattatt

SEQ ID NO: 68419 - DNA, 22 bp, Artificial Sequence
  chemically synthesized
ttattattcacatggttatata

SEQ ID NO: 68420 - DNA, 22 bp, Artificial Sequence
  chemically synthesized
ttattcacatggttatataaca

SEQ ID NO: 68421 - DNA, 22 bp, Artificial Sequence
  chemically synthesized
ttcacatggttatataacactt

SEQ ID NO: 68422 - DNA, 22 bp, Artificial Sequence
  chemically synthesized
acatggttatataacactttca

SEQ ID NO: 68423 - DNA, 22 bp, Artificial Sequence
  chemically synthesized
tataacactttcaaatgtgcca

SEQ ID NO: 68424 - DNA, 22 bp, Artificial Sequence
  chemically synthesized
tcaaatgtgccattcaggcaaa

SEQ ID NO: 68425 - DNA, 22 bp, Artificial Sequence
  chemically synthesized
caaatgtgccattcaggcaaaa

SEQ ID NO: 68426 - DNA, 22 bp, Artificial Sequence
  chemically synthesized
aaatgtgccattcaggcaaaaa

SEQ ID NO: 68427 - DNA, 22 bp, Artificial Sequence
  chemically synthesized
aggcaaaaatgggaactacggg

SEQ ID NO: 68428 - DNA, 22 bp, Artificial Sequence
  chemically synthesized
cgggccacactcgacaacaggt

SEQ ID NO: 68429 - DNA, 22 bp, Artificial Sequence
  chemically synthesized
gacaacaggttttcctctgtac

SEQ ID NO: 68430 - DNA, 22 bp, Artificial Sequence
  chemically synthesized
tcctctgtacctgcacccagct

SEQ ID NO: 68431 - DNA, 22 bp, Artificial Sequence
  chemically synthesized
cctctgtacctgcacccagctc

SEQ ID NO: 68432 - DNA, 22 bp, Artificial Sequence
  chemically synthesized
ctctgtacctgcacccagctct

SEQ ID NO: 68433 - DNA, 22 bp, Artificial Sequence
  chemically synthesized
tgtacctgcacccagctctcta

SEQ ID NO: 68434 - DNA, 22 bp, Artificial Sequence
  chemically synthesized
tacctgcacccagctctctacg

SEQ ID NO: 68435 - DNA, 22 bp, Artificial Sequence
  chemically synthesized
cacccagctctctacgggcctg

SEQ ID NO: 68436 - DNA, 22 bp, Artificial Sequence
  chemically synthesized
tctacgggcctggtcgctcctg

SEQ ID NO: 68437 - DNA, 22 bp, Artificial Sequence
  chemically synthesized
tacgggcctggtcgctcctggt

SEQ ID NO: 68438 - DNA, 22 bp, Artificial Sequence
  chemically synthesized
cgggcctggtcgctcctggtgg

SEQ ID NO: 68439 - DNA, 22 bp, Artificial Sequence
  chemically synthesized
gtcgctcctggtggccctgccc

SEQ ID NO: 68440 - DNA, 22 bp, Artificial Sequence
  chemically synthesized
ctggtggccctgcccaaaggcc

SEQ ID NO: 68441 - DNA, 22 bp, Artificial Sequence
  chemically synthesized
gtggccctgcccaaaggccacc

SEQ ID NO: 68442 - DNA, 22 bp, Artificial Sequence
  chemically synthesized
cccaaaggccaccccctccccc

SEQ ID NO: 68443 - DNA, 22 bp, Artificial Sequence
  chemically synthesized
ccccatgccccagtcagaataa

SEQ ID NO: 68444 - DNA, 22 bp, Artificial Sequence
  chemically synthesized
agggaaaaaatcatgggctttg

SEQ ID NO: 68445 - DNA, 22 bp, Artificial Sequence
  chemically synthesized
tggagccaggaaaccgtggacc

SEQ ID NO: 68446 - DNA, 22 bp, Artificial Sequence
  chemically synthesized
ggagccaggaaaccgtggacct

SEQ ID NO: 68447 - DNA, 22 bp, Artificial Sequence
  chemically synthesized
gagccaggaaaccgtggacctg

SEQ ID NO: 68448 - DNA, 22 bp, Artificial Sequence
  chemically synthesized
aattccagctccaatatttact

SEQ ID NO: 68449 - DNA, 22 bp, Artificial Sequence
  chemically synthesized
cagctccaatatttactggttg

SEQ ID NO: 68450 - DNA, 22 bp, Artificial Sequence
  chemically synthesized
caatatttactggttgtgcagc

SEQ ID NO: 68451 - DNA, 22 bp, Artificial Sequence
  chemically synthesized
actggttgtgcagccatgagca

SEQ ID NO: 68452 - DNA, 22 bp, Artificial Sequence
  chemically synthesized
ctggttgtgcagccatgagcaa

SEQ ID NO: 68453 - DNA, 22 bp, Artificial Sequence
  chemically synthesized
gttgtgcagccatgagcaagtc

SEQ ID NO: 68454 - DNA, 22 bp, Artificial Sequence
  chemically synthesized
tgcagccatgagcaagtcactc

SEQ ID NO: 68455 - DNA, 22 bp, Artificial Sequence
  chemically synthesized
aacctctcggagcctcagatac

SEQ ID NO: 68456 - DNA, 22 bp, Artificial Sequence
  chemically synthesized
tcggagcctcagatacctctgc

SEQ ID NO: 68457 - DNA, 22 bp, Artificial Sequence
  chemically synthesized
ggagcctcagatacctctgctg

SEQ ID NO: 68458 - DNA, 22 bp, Artificial Sequence
  chemically synthesized
agatacctctgctgtattgtag

SEQ ID NO: 68459 - DNA, 22 bp, Artificial Sequence
  chemically synthesized
tgctgtattgtagagaccacag

SEQ ID NO: 68460 - DNA, 22 bp, Artificial Sequence
  chemically synthesized
ctgtattgtagagaccacagta

SEQ ID NO: 68461 - DNA, 22 bp, Artificial Sequence
  chemically synthesized
tattgtagagaccacagtacct

SEQ ID NO: 68462 - DNA, 22 bp, Artificial Sequence
  chemically synthesized
tagagaccacagtacctatgac

SEQ ID NO: 68463 - DNA, 22 bp, Artificial Sequence
  chemically synthesized
tgacataggcctgctgggaaag

SEQ ID NO: 68464 - DNA, 22 bp, Artificial Sequence
  chemically synthesized
ctgggaaagtcaagagtgacgg

SEQ ID NO: 68465 - DNA, 22 bp, Artificial Sequence
  chemically synthesized
ggaaagtcaagagtgacggtta

SEQ ID NO: 68466 - DNA, 22 bp, Artificial Sequence
  chemically synthesized
tataaatctcccatccagatgc

SEQ ID NO: 68467 - DNA, 22 bp, Artificial Sequence
  chemically synthesized
ccatccagatgctctacaaatg

SEQ ID NO: 68468 - DNA, 22 bp, Artificial Sequence
  chemically synthesized
tacaaatgcaggcagaagggat

SEQ ID NO: 68469 - DNA, 22 bp, Artificial Sequence
  chemically synthesized
caaatgcaggcagaagggatga

SEQ ID NO: 68470 - DNA, 22 bp, Artificial Sequence
  chemically synthesized
agtgagcaaaggcaacacttct

SEQ ID NO: 68471 - DNA, 22 bp, Artificial Sequence
  chemically synthesized
cttaaagagagagaaaagtcaa

SEQ ID NO: 68472 - DNA, 22 bp, Artificial Sequence
  chemically synthesized
ttaaagagagagaaaagtcaag

SEQ ID NO: 68473 - DNA, 22 bp, Artificial Sequence
  chemically synthesized
aaagagagagaaaagtcaaggc

SEQ ID NO: 68474 - DNA, 22 bp, Artificial Sequence
  chemically synthesized
aagagagagaaaagtcaaggcc

SEQ ID NO: 68475 - DNA, 22 bp, Artificial Sequence
  chemically synthesized
tcttagtccttttgtgttgcta

SEQ ID NO: 68476 - DNA, 22 bp, Artificial Sequence
  chemically synthesized
agtccttttgtgttgctatata

SEQ ID NO: 68477 - DNA, 22 bp, Artificial Sequence
  chemically synthesized
gtccttttgtgttgctatataa

SEQ ID NO: 68478 - DNA, 22 bp, Artificial Sequence
  chemically synthesized
ttgtgttgctatataaaggaat

SEQ ID NO: 68479 - DNA, 22 bp, Artificial Sequence
  chemically synthesized
tgtgttgctatataaaggaata

SEQ ID NO: 68480 - DNA, 22 bp, Artificial Sequence
  chemically synthesized
gtgttgctatataaaggaatac

SEQ ID NO: 68481 - DNA, 22 bp, Artificial Sequence
  chemically synthesized
tgttgctatataaaggaatacc

SEQ ID NO: 68482 - DNA, 22 bp, Artificial Sequence
  chemically synthesized
ctatataaaggaatacctgaag

SEQ ID NO: 68483 - DNA, 22 bp, Artificial Sequence
  chemically synthesized
tataaaggaatacctgaaggtg

SEQ ID NO: 68484 - DNA, 22 bp, Artificial Sequence
  chemically synthesized
aaggtgagtaatttacaaggaa

SEQ ID NO: 68485 - DNA, 22 bp, Artificial Sequence
  chemically synthesized
acaaggaaaagggatttattca

SEQ ID NO: 68486 - DNA, 22 bp, Artificial Sequence
  chemically synthesized
caaggaaaagggatttattcag

SEQ ID NO: 68487 - DNA, 22 bp, Artificial Sequence
  chemically synthesized
attcagctcatgattctgcaag

SEQ ID NO: 68488 - DNA, 22 bp, Artificial Sequence
  chemically synthesized
ttcagctcatgattctgcaagc

SEQ ID NO: 68489 - DNA, 22 bp, Artificial Sequence
  chemically synthesized
agctcatgattctgcaagctct

SEQ ID NO: 68490 - DNA, 22 bp, Artificial Sequence
  chemically synthesized
atgattctgcaagctctccagg

SEQ ID NO: 68491 - DNA, 22 bp, Artificial Sequence
  chemically synthesized
tgcaagctctccaggaagcatg

SEQ ID NO: 68492 - DNA, 22 bp, Artificial Sequence
  chemically synthesized
caagctctccaggaagcatggc

SEQ ID NO: 68493 - DNA, 22 bp, Artificial Sequence
  chemically synthesized
tccaggaagcatggcaccagca

SEQ ID NO: 68494 - DNA, 22 bp, Artificial Sequence
  chemically synthesized
caggaagcatggcaccagcatc

SEQ ID NO: 68495 - DNA, 22 bp, Artificial Sequence
  chemically synthesized
cttctggtgagggccttaagct

SEQ ID NO: 68496 - DNA, 22 bp, Artificial Sequence
  chemically synthesized
ctggtgagggccttaagctgct

SEQ ID NO: 68497 - DNA, 22 bp, Artificial Sequence
  chemically synthesized
tggtgagggccttaagctgctt

SEQ ID NO: 68498 - DNA, 22 bp, Artificial Sequence
  chemically synthesized
gtgagggccttaagctgctttc

SEQ ID NO: 68499 - DNA, 22 bp, Artificial Sequence
  chemically synthesized
aagctgctttcactgatggcag

SEQ ID NO: 68500 - DNA, 22 bp, Artificial Sequence
  chemically synthesized
agctgctttcactgatggcaga

SEQ ID NO: 68501 - DNA, 22 bp, Artificial Sequence
  chemically synthesized
ctttcactgatggcagaaggtg

SEQ ID NO: 68502 - DNA, 22 bp, Artificial Sequence
  chemically synthesized
tcactgatggcagaaggtgaag

SEQ ID NO: 68503 - DNA, 22 bp, Artificial Sequence
  chemically synthesized
cactgatggcagaaggtgaagg

SEQ ID NO: 68504 - DNA, 22 bp, Artificial Sequence
  chemically synthesized
actgatggcagaaggtgaaggg

SEQ ID NO: 68505 - DNA, 22 bp, Artificial Sequence
  chemically synthesized
atggcagaaggtgaaggggagc

SEQ ID NO: 68506 - DNA, 22 bp, Artificial Sequence
  chemically synthesized
catgtgcagagatcaatcacat

SEQ ID NO: 68507 - DNA, 22 bp, Artificial Sequence
  chemically synthesized
tttttaataatcagccttcaag

SEQ ID NO: 68508 - DNA, 22 bp, Artificial Sequence
  chemically synthesized
tttaataatcagccttcaaggg

SEQ ID NO: 68509 - DNA, 22 bp, Artificial Sequence
  chemically synthesized
ttaataatcagccttcaaggga

SEQ ID NO: 68510 - DNA, 22 bp, Artificial Sequence
  chemically synthesized
taataatcagccttcaagggaa

SEQ ID NO: 68511 - DNA, 22 bp, Artificial Sequence
  chemically synthesized
aataatcagccttcaagggaaa

SEQ ID NO: 68512 - DNA, 22 bp, Artificial Sequence
  chemically synthesized
ataatcagccttcaagggaaat

SEQ ID NO: 68513 - DNA, 22 bp, Artificial Sequence
  chemically synthesized
caagggaaatcatagcgggaga

SEQ ID NO: 68514 - DNA, 22 bp, Artificial Sequence
  chemically synthesized
aagggaaatcatagcgggagaa

SEQ ID NO: 68515 - DNA, 22 bp, Artificial Sequence
  chemically synthesized
actcattatcacaaggacggca

SEQ ID NO: 68516 - DNA, 22 bp, Artificial Sequence
  chemically synthesized
ctcattatcacaaggacggcac

SEQ ID NO: 68517 - DNA, 22 bp, Artificial Sequence
  chemically synthesized
attatcacaaggacggcaccaa

SEQ ID NO: 68518 - DNA, 22 bp, Artificial Sequence
  chemically synthesized
tcacaaggacggcaccaagcct

SEQ ID NO: 68519 - DNA, 22 bp, Artificial Sequence
  chemically synthesized
tcacaggggttcctcccccatg

SEQ ID NO: 68520 - DNA, 22 bp, Artificial Sequence
  chemically synthesized
cacaggggttcctcccccatga

SEQ ID NO: 68521 - DNA, 22 bp, Artificial Sequence
  chemically synthesized
acaggggttcctcccccatgac

SEQ ID NO: 68522 - DNA, 22 bp, Artificial Sequence
  chemically synthesized
ctcccccatgacccaaacacct

SEQ ID NO: 68523 - DNA, 22 bp, Artificial Sequence
  chemically synthesized
ccccatgacccaaacacctccc

SEQ ID NO: 68524 - DNA, 22 bp, Artificial Sequence
  chemically synthesized
ccattaggccccacttccaaca

SEQ ID NO: 68525 - DNA, 22 bp, Artificial Sequence
  chemically synthesized
ggccccacttccaacactgagg

SEQ ID NO: 68526 - DNA, 22 bp, Artificial Sequence
  chemically synthesized
ccaacactgaggaccaaatttc

SEQ ID NO: 68527 - DNA, 22 bp, Artificial Sequence
  chemically synthesized
caacactgaggaccaaatttcc

SEQ ID NO: 68528 - DNA, 22 bp, Artificial Sequence
  chemically synthesized
aggaccaaatttccacatgaga

SEQ ID NO: 68529 - DNA, 22 bp, Artificial Sequence
  chemically synthesized
ccacatgagatttggaggggac

SEQ ID NO: 68530 - DNA, 22 bp, Artificial Sequence
  chemically synthesized
cacatgagatttggaggggaca

SEQ ID NO: 68531 - DNA, 22 bp, Artificial Sequence
  chemically synthesized
ggaggggacaaacaaattatag

SEQ ID NO: 68532 - DNA, 22 bp, Artificial Sequence
  chemically synthesized
gaggggacaaacaaattatagc

SEQ ID NO: 68533 - DNA, 22 bp, Artificial Sequence
  chemically synthesized
tagcagccactatctatggtga

SEQ ID NO: 68534 - DNA, 22 bp, Artificial Sequence
  chemically synthesized
tctatggtgatttgtttggttt

SEQ ID NO: 68535 - DNA, 22 bp, Artificial Sequence
  chemically synthesized
tggtgatttgtttggtttttag

SEQ ID NO: 68536 - DNA, 22 bp, Artificial Sequence
  chemically synthesized
gtttggtttttagctcttgtct

SEQ ID NO: 68537 - DNA, 22 bp, Artificial Sequence
  chemically synthesized
tttggtttttagctcttgtctg

SEQ ID NO: 68538 - DNA, 22 bp, Artificial Sequence
  chemically synthesized
ggtttttagctcttgtctgctc

SEQ ID NO: 68539 - DNA, 22 bp, Artificial Sequence
  chemically synthesized
gtttttagctcttgtctgctcc

SEQ ID NO: 68540 - DNA, 22 bp, Artificial Sequence
  chemically synthesized
ttagctcttgtctgctccaact

SEQ ID NO: 68541 - DNA, 22 bp, Artificial Sequence
  chemically synthesized
tagctcttgtctgctccaactg

SEQ ID NO: 68542 - DNA, 22 bp, Artificial Sequence
  chemically synthesized
agctcttgtctgctccaactgc

SEQ ID NO: 68543 - DNA, 22 bp, Artificial Sequence
  chemically synthesized
gctcttgtctgctccaactgct

SEQ ID NO: 68544 - DNA, 22 bp, Artificial Sequence
  chemically synthesized
ttgtctgctccaactgctctca

SEQ ID NO: 68545 - DNA, 22 bp, Artificial Sequence
  chemically synthesized
gtctgctccaactgctctcagg

SEQ ID NO: 68546 - DNA, 22 bp, Artificial Sequence
  chemically synthesized
tctgctccaactgctctcaggc

SEQ ID NO: 68547 - DNA, 22 bp, Artificial Sequence
  chemically synthesized
ctccaactgctctcaggcagac

SEQ ID NO: 68548 - DNA, 22 bp, Artificial Sequence
  chemically synthesized
caactgctctcaggcagacata

SEQ ID NO: 68549 - DNA, 22 bp, Artificial Sequence
  chemically synthesized
ctctcaggcagacatacctgct

SEQ ID NO: 68550 - DNA, 22 bp, Artificial Sequence
  chemically synthesized
tcaggcagacatacctgcttaa

SEQ ID NO: 68551 - DNA, 22 bp, Artificial Sequence
  chemically synthesized
aggcagacatacctgcttaaga

SEQ ID NO: 68552 - DNA, 22 bp, Artificial Sequence
  chemically synthesized
cttaagaaccttcactggctcc

SEQ ID NO: 68553 - DNA, 22 bp, Artificial Sequence
  chemically synthesized
aagaaccttcactggctcccca

SEQ ID NO: 68554 - DNA, 22 bp, Artificial Sequence
  chemically synthesized
agaaccttcactggctccccac

SEQ ID NO: 68555 - DNA, 22 bp, Artificial Sequence
  chemically synthesized
cactggctccccacagcctcat

SEQ ID NO: 68556 - DNA, 22 bp, Artificial Sequence
  chemically synthesized
actggctccccacagcctcatg

SEQ ID NO: 68557 - DNA, 22 bp, Artificial Sequence
  chemically synthesized
gctccccacagcctcatgaatc

SEQ ID NO: 68558 - DNA, 22 bp, Artificial Sequence
  chemically synthesized
cccacagcctcatgaatcaagt

SEQ ID NO: 68559 - DNA, 22 bp, Artificial Sequence
  chemically synthesized
atgaatcaagtccaaactccat

SEQ ID NO: 68560 - DNA, 22 bp, Artificial Sequence
  chemically synthesized
catgctcctccttggcccctac

SEQ ID NO: 68561 - DNA, 22 bp, Artificial Sequence
  chemically synthesized
ctccttggcccctacctcaacc

SEQ ID NO: 68562 - DNA, 22 bp, Artificial Sequence
  chemically synthesized
cttggcccctacctcaacctac

SEQ ID NO: 68563 - DNA, 22 bp, Artificial Sequence
  chemically synthesized
ggcccctacctcaacctacctt

SEQ ID NO: 68564 - DNA, 22 bp, Artificial Sequence
  chemically synthesized
gcccctacctcaacctaccttg

SEQ ID NO: 68565 - DNA, 22 bp, Artificial Sequence
  chemically synthesized
cctcaacctaccttgcagcccc

SEQ ID NO: 68566 - DNA, 22 bp, Artificial Sequence
  chemically synthesized
aacctaccttgcagccccatca

SEQ ID NO: 68567 - DNA, 22 bp, Artificial Sequence
  chemically synthesized
ccttgcagccccatcacccata

SEQ ID NO: 68568 - DNA, 22 bp, Artificial Sequence
  chemically synthesized
gcagccccatcacccatatctc

SEQ ID NO: 68569 - DNA, 22 bp, Artificial Sequence
  chemically synthesized
cagccccatcacccatatctct

SEQ ID NO: 68570 - DNA, 22 bp, Artificial Sequence
  chemically synthesized
tgtatatatgcatcttggactc

SEQ ID NO: 68571 - DNA, 22 bp, Artificial Sequence
  chemically synthesized
tatatatgcatcttggactcca

SEQ ID NO: 68572 - DNA, 22 bp, Artificial Sequence
  chemically synthesized
ggactccagtcagagtagaaca

SEQ ID NO: 68573 - DNA, 22 bp, Artificial Sequence
  chemically synthesized
gactccagtcagagtagaacag

SEQ ID NO: 68574 - DNA, 22 bp, Artificial Sequence
  chemically synthesized
cagtcagagtagaacagagtcc

SEQ ID NO: 68575 - DNA, 22 bp, Artificial Sequence
  chemically synthesized
tacccaaagccttagggccaaa

SEQ ID NO: 68576 - DNA, 22 bp, Artificial Sequence
  chemically synthesized
acccaaagccttagggccaaaa

SEQ ID NO: 68577 - DNA, 22 bp, Artificial Sequence
  chemically synthesized
cccaaagccttagggccaaaac

SEQ ID NO: 68578 - DNA, 22 bp, Artificial Sequence
  chemically synthesized
agggccaaaacggttttgaacc

SEQ ID NO: 68579 - DNA, 22 bp, Artificial Sequence
  chemically synthesized
gggccaaaacggttttgaacct

SEQ ID NO: 68580 - DNA, 22 bp, Artificial Sequence
  chemically synthesized
tgaacctcagaacttgtttgga

SEQ ID NO: 68581 - DNA, 22 bp, Artificial Sequence
  chemically synthesized
gaacctcagaacttgtttggat

SEQ ID NO: 68582 - DNA, 22 bp, Artificial Sequence
  chemically synthesized
aacctcagaacttgtttggatt

SEQ ID NO: 68583 - DNA, 22 bp, Artificial Sequence
  chemically synthesized
agaacttgtttggattttagaa

SEQ ID NO: 68584 - DNA, 22 bp, Artificial Sequence
  chemically synthesized
gtttggattttagaaaggcagt

SEQ ID NO: 68585 - DNA, 22 bp, Artificial Sequence
  chemically synthesized
tttggattttagaaaggcagta

SEQ ID NO: 68586 - DNA, 22 bp, Artificial Sequence
  chemically synthesized
ggattttagaaaggcagtaatg

SEQ ID NO: 68587 - DNA, 22 bp, Artificial Sequence
  chemically synthesized
gattttagaaaggcagtaatgg

SEQ ID NO: 68588 - DNA, 22 bp, Artificial Sequence
  chemically synthesized
tagaaaggcagtaatgggcaat

SEQ ID NO: 68589 - DNA, 22 bp, Artificial Sequence
  chemically synthesized
agaaaggcagtaatgggcaatc

SEQ ID NO: 68590 - DNA, 22 bp, Artificial Sequence
  chemically synthesized
gaaaggcagtaatgggcaatca

SEQ ID NO: 68591 - DNA, 22 bp, Artificial Sequence
  chemically synthesized
cttggaagaatctggagctgca

SEQ ID NO: 68592 - DNA, 22 bp, Artificial Sequence
  chemically synthesized
ggaagaatctggagctgcatac

SEQ ID NO: 68593 - DNA, 22 bp, Artificial Sequence
  chemically synthesized
gaagaatctggagctgcatact

SEQ ID NO: 68594 - DNA, 22 bp, Artificial Sequence
  chemically synthesized
gagctgcatactgtaatctatg

SEQ ID NO: 68595 - DNA, 22 bp, Artificial Sequence
  chemically synthesized
catactgtaatctatgcagcaa

SEQ ID NO: 68596 - DNA, 22 bp, Artificial Sequence
  chemically synthesized
taatctatgcagcaaaatatat

SEQ ID NO: 68597 - DNA, 22 bp, Artificial Sequence
  chemically synthesized
tgcagcaaaatatatgaatatg

SEQ ID NO: 68598 - DNA, 22 bp, Artificial Sequence
  chemically synthesized
acacaactaaattaaaaataat

SEQ ID NO: 68599 - DNA, 22 bp, Artificial Sequence
  chemically synthesized
aattaaaaataatctcatgtca

SEQ ID NO: 68600 - DNA, 22 bp, Artificial Sequence
  chemically synthesized
aaaataatctcatgtcagttca

SEQ ID NO: 68601 - DNA, 22 bp, Artificial Sequence
  chemically synthesized
atgtcagttcacgtcaggtgct

SEQ ID NO: 68602 - DNA, 22 bp, Artificial Sequence
  chemically synthesized
acgtcaggtgctaccatcaaat

SEQ ID NO: 68603 - DNA, 22 bp, Artificial Sequence
  chemically synthesized
ccatcaaataaatcacaaaaaa

SEQ ID NO: 68604 - DNA, 22 bp, Artificial Sequence
  chemically synthesized
ttggttttcgtaacattttaca

SEQ ID NO: 68605 - DNA, 22 bp, Artificial Sequence
  chemically synthesized
tggttttcgtaacattttacat

SEQ ID NO: 68606 - DNA, 22 bp, Artificial Sequence
  chemically synthesized
ggttttcgtaacattttacatt

SEQ ID NO: 68607 - DNA, 22 bp, Artificial Sequence
  chemically synthesized
gttttcgtaacattttacattt

SEQ ID NO: 68608 - DNA, 22 bp, Artificial Sequence
  chemically synthesized
tcgtaacattttacatttcaga

SEQ ID NO: 68609 - DNA, 22 bp, Artificial Sequence
  chemically synthesized
cgtaacattttacatttcagac

SEQ ID NO: 68610 - DNA, 22 bp, Artificial Sequence
  chemically synthesized
gtaacattttacatttcagacg

SEQ ID NO: 68611 - DNA, 22 bp, Artificial Sequence
  chemically synthesized
tacatttcagacggtggataaa

SEQ ID NO: 68612 - DNA, 22 bp, Artificial Sequence
  chemically synthesized
acatttcagacggtggataaag

SEQ ID NO: 68613 - DNA, 22 bp, Artificial Sequence
  chemically synthesized
catttcagacggtggataaaga

SEQ ID NO: 68614 - DNA, 22 bp, Artificial Sequence
  chemically synthesized
cagacggtggataaagaactgt

SEQ ID NO: 68615 - DNA, 22 bp, Artificial Sequence
  chemically synthesized
agacggtggataaagaactgtg

SEQ ID NO: 68616 - DNA, 22 bp, Artificial Sequence
  chemically synthesized
tggaggccaggcgtggtggctc

SEQ ID NO: 68617 - DNA, 22 bp, Artificial Sequence
  chemically synthesized
acacctgtaattcgagcacttt

SEQ ID NO: 68618 - DNA, 22 bp, Artificial Sequence
  chemically synthesized
taattcgagcactttgggaggc

SEQ ID NO: 68619 - DNA, 22 bp, Artificial Sequence
  chemically synthesized
gagcactttgggaggctgaggc

SEQ ID NO: 68620 - DNA, 22 bp, Artificial Sequence
  chemically synthesized
tgggaggctgaggcgggaggat

SEQ ID NO: 68621 - DNA, 22 bp, Artificial Sequence
  chemically synthesized
gggaggctgaggcgggaggatc

SEQ ID NO: 68622 - DNA, 22 bp, Artificial Sequence
  chemically synthesized
ggaggctgaggcgggaggatca

SEQ ID NO: 68623 - DNA, 22 bp, Artificial Sequence
  chemically synthesized
aggcgggaggatcacctcctcg

SEQ ID NO: 68624 - DNA, 22 bp, Artificial Sequence
  chemically synthesized
ctcggatccactgaggaggtca

SEQ ID NO: 68625 - DNA, 22 bp, Artificial Sequence
  chemically synthesized
ggatccactgaggaggtcagga

SEQ ID NO: 68626 - DNA, 22 bp, Artificial Sequence
  chemically synthesized
aggaggtcaggagtttgcgact

SEQ ID NO: 68627 - DNA, 22 bp, Artificial Sequence
  chemically synthesized
gcgactagcctggccaacgtgg

SEQ ID NO: 68628 - DNA, 22 bp, Artificial Sequence
  chemically synthesized
cgactagcctggccaacgtggt

SEQ ID NO: 68629 - DNA, 22 bp, Artificial Sequence
  chemically synthesized
gcctggccaacgtggtgaaacc

SEQ ID NO: 68630 - DNA, 22 bp, Artificial Sequence
  chemically synthesized
gccaacgtggtgaaaccccttc

SEQ ID NO: 68631 - DNA, 22 bp, Artificial Sequence
  chemically synthesized
ctctactaaaaatacaaaaatt

SEQ ID NO: 68632 - DNA, 22 bp, Artificial Sequence
  chemically synthesized
tctactaaaaatacaaaaatta

SEQ ID NO: 68633 - DNA, 22 bp, Artificial Sequence
  chemically synthesized
tactaaaaatacaaaaattagc

SEQ ID NO: 68634 - DNA, 22 bp, Artificial Sequence
  chemically synthesized
ctaaaaatacaaaaattagccg

SEQ ID NO: 68635 - DNA, 22 bp, Artificial Sequence
  chemically synthesized
aaaatacaaaaattagccgggc

SEQ ID NO: 68636 - DNA, 22 bp, Artificial Sequence
  chemically synthesized
gccgggcgtggtggcaggtacc

SEQ ID NO: 68637 - DNA, 22 bp, Artificial Sequence
  chemically synthesized
taatcccagcttcttgggaggc

SEQ ID NO: 68638 - DNA, 22 bp, Artificial Sequence
  chemically synthesized
cttgggaggctgaggcaggaga

SEQ ID NO: 68639 - DNA, 22 bp, Artificial Sequence
  chemically synthesized
ttgggaggctgaggcaggagaa

SEQ ID NO: 68640 - DNA, 22 bp, Artificial Sequence
  chemically synthesized
gggaggctgaggcaggagaacc

SEQ ID NO: 68641 - DNA, 22 bp, Artificial Sequence
  chemically synthesized
ggaggctgaggcaggagaacca

SEQ ID NO: 68642 - DNA, 22 bp, Artificial Sequence
  chemically synthesized
aggcaggagaaccacttgaacc

SEQ ID NO: 68643 - DNA, 22 bp, Artificial Sequence
  chemically synthesized
gaacccgggagacagatgttgc

SEQ ID NO: 68644 - DNA, 22 bp, Artificial Sequence
  chemically synthesized
aacccgggagacagatgttgca

SEQ ID NO: 68645 - DNA, 22 bp, Artificial Sequence
  chemically synthesized
cagtgagctgagactgcaccat

SEQ ID NO: 68646 - DNA, 22 bp, Artificial Sequence
  chemically synthesized
agactgcaccattgcactccag

SEQ ID NO: 68647 - DNA, 22 bp, Artificial Sequence
  chemically synthesized
caccattgcactccagcctggg

SEQ ID NO: 68648 - DNA, 22 bp, Artificial Sequence
  chemically synthesized
cactccagcctgggcaacaaga

SEQ ID NO: 68649 - DNA, 22 bp, Artificial Sequence
  chemically synthesized
cagcctgggcaacaagagcgaa

SEQ ID NO: 68650 - DNA, 22 bp, Artificial Sequence
  chemically synthesized
ggcaacaagagcgaaactccat

SEQ ID NO: 68651 - DNA, 22 bp, Artificial Sequence
  chemically synthesized
catctcaaaaaaaaaagaaaaa

SEQ ID NO: 68652 - DNA, 22 bp, Artificial Sequence
  chemically synthesized
aaaaaaaaaagaaaaagaactg

SEQ ID NO: 68653 - DNA, 22 bp, Artificial Sequence
  chemically synthesized
tggacatgtgctccttatcttc

SEQ ID NO: 68654 - DNA, 22 bp, Artificial Sequence
  chemically synthesized
cttatcttccacctctggtttt

SEQ ID NO: 68655 - DNA, 22 bp, Artificial Sequence
  chemically synthesized
atcttccacctctggttttccc

SEQ ID NO: 68656 - DNA, 22 bp, Artificial Sequence
  chemically synthesized
tcttccacctctggttttccca

SEQ ID NO: 68657 - DNA, 22 bp, Artificial Sequence
  chemically synthesized
ccacctctggttttcccagctc

SEQ ID NO: 68658 - DNA, 22 bp, Artificial Sequence
  chemically synthesized
cacctctggttttcccagctct

SEQ ID NO: 68659 - DNA, 22 bp, Artificial Sequence
  chemically synthesized
tggttttcccagctctgtatct

SEQ ID NO: 68660 - DNA, 22 bp, Artificial Sequence
  chemically synthesized
gttttcccagctctgtatcttt

SEQ ID NO: 68661 - DNA, 22 bp, Artificial Sequence
  chemically synthesized
tcccagctctgtatctttgttc

SEQ ID NO: 68662 - DNA, 22 bp, Artificial Sequence
  chemically synthesized
cccagctctgtatctttgttca

SEQ ID NO: 68663 - DNA, 22 bp, Artificial Sequence
  chemically synthesized
ccagctctgtatctttgttcat

SEQ ID NO: 68664 - DNA, 22 bp, Artificial Sequence
  chemically synthesized
tgtatctttgttcatggtacct

SEQ ID NO: 68665 - DNA, 22 bp, Artificial Sequence
  chemically synthesized
tatctttgttcatggtacctcc

SEQ ID NO: 68666 - DNA, 22 bp, Artificial Sequence
  chemically synthesized
tgttcatggtacctcctaatcc

SEQ ID NO: 68667 - DNA, 22 bp, Artificial Sequence
  chemically synthesized
gttcatggtacctcctaatcct

SEQ ID NO: 68668 - DNA, 22 bp, Artificial Sequence
  chemically synthesized
ttcatggtacctcctaatccta

SEQ ID NO: 68669 - DNA, 22 bp, Artificial Sequence
  chemically synthesized
atggtacctcctaatcctagaa

SEQ ID NO: 68670 - DNA, 22 bp, Artificial Sequence
  chemically synthesized
ctaatcctagaataaaattctc

SEQ ID NO: 68671 - DNA, 22 bp, Artificial Sequence
  chemically synthesized
atcctagaataaaattctcatg

SEQ ID NO: 68672 - DNA, 22 bp, Artificial Sequence
  chemically synthesized
gaataaaattctcatgacacca

SEQ ID NO: 68673 - DNA, 22 bp, Artificial Sequence
  chemically synthesized
tcatgacaccatcatcgctgaa

SEQ ID NO: 68674 - DNA, 22 bp, Artificial Sequence
  chemically synthesized
atgacaccatcatcgctgaact

SEQ ID NO: 68675 - DNA, 22 bp, Artificial Sequence
  chemically synthesized
aactcctactaatgcttcaaag

SEQ ID NO: 68676 - DNA, 22 bp, Artificial Sequence
  chemically synthesized
ctactaatgcttcaaagaccca

SEQ ID NO: 68677 - DNA, 22 bp, Artificial Sequence
  chemically synthesized
ctaatgcttcaaagacccatct

SEQ ID NO: 68678 - DNA, 22 bp, Artificial Sequence
  chemically synthesized
atgcttcaaagacccatctgaa

SEQ ID NO: 68679 - DNA, 22 bp, Artificial Sequence
  chemically synthesized
caaagacccatctgaaaatgcc

SEQ ID NO: 68680 - DNA, 22 bp, Artificial Sequence
  chemically synthesized
aaagacccatctgaaaatgcct

SEQ ID NO: 68681 - DNA, 22 bp, Artificial Sequence
  chemically synthesized
aaaatgccttccgctaaataaa

SEQ ID NO: 68682 - DNA, 22 bp, Artificial Sequence
  chemically synthesized
ccgctaaataaaaattgaatga

SEQ ID NO: 68683 - DNA, 22 bp, Artificial Sequence
  chemically synthesized
cgctaaataaaaattgaatgaa

SEQ ID NO: 68684 - DNA, 22 bp, Artificial Sequence
  chemically synthesized
aataaaaattgaatgaattggg

SEQ ID NO: 68685 - DNA, 22 bp, Artificial Sequence
  chemically synthesized
aatgaattgggagagtactctg

SEQ ID NO: 68686 - DNA, 22 bp, Artificial Sequence
  chemically synthesized
ggagagtactctgtgcagtgga

SEQ ID NO: 68687 - DNA, 22 bp, Artificial Sequence
  chemically synthesized
tgtgcagtggagtgtcagttct

SEQ ID NO: 68688 - DNA, 22 bp, Artificial Sequence
  chemically synthesized
tgcagtggagtgtcagttctgg

SEQ ID NO: 68689 - DNA, 22 bp, Artificial Sequence
  chemically synthesized
tggaaacccagttctaatgcac

SEQ ID NO: 68690 - DNA, 22 bp, Artificial Sequence
  chemically synthesized
gaaacccagttctaatgcacct

SEQ ID NO: 68691 - DNA, 22 bp, Artificial Sequence
  chemically synthesized
taatgcacctggggtgacctcc

SEQ ID NO: 68692 - DNA, 22 bp, Artificial Sequence
  chemically synthesized
atgcacctggggtgacctcctc

SEQ ID NO: 68693 - DNA, 22 bp, Artificial Sequence
  chemically synthesized
gggtgacctcctctctctgggc

SEQ ID NO: 68694 - DNA, 22 bp, Artificial Sequence
  chemically synthesized
ctctctctgggcctcagtttct

SEQ ID NO: 68695 - DNA, 22 bp, Artificial Sequence
  chemically synthesized
tctctgggcctcagtttctcat

SEQ ID NO: 68696 - DNA, 22 bp, Artificial Sequence
  chemically synthesized
tctgggcctcagtttctcatga

SEQ ID NO: 68697 - DNA, 22 bp, Artificial Sequence
  chemically synthesized
tgggcctcagtttctcatgact

SEQ ID NO: 68698 - DNA, 22 bp, Artificial Sequence
  chemically synthesized
ggcctcagtttctcatgactaa

SEQ ID NO: 68699 - DNA, 22 bp, Artificial Sequence
  chemically synthesized
agtttctcatgactaaaagaaa

SEQ ID NO: 68700 - DNA, 22 bp, Artificial Sequence
  chemically synthesized
ctcatgactaaaagaaaaggat

SEQ ID NO: 68701 - DNA, 22 bp, Artificial Sequence
  chemically synthesized
tcatgactaaaagaaaaggatt

SEQ ID NO: 68702 - DNA, 22 bp, Artificial Sequence
  chemically synthesized
atgactaaaagaaaaggattgg

SEQ ID NO: 68703 - DNA, 22 bp, Artificial Sequence
  chemically synthesized
aaagaaaaggattggtctaaaa

SEQ ID NO: 68704 - DNA, 22 bp, Artificial Sequence
  chemically synthesized
gtctaaaaattattttctgctt

SEQ ID NO: 68705 - DNA, 22 bp, Artificial Sequence
  chemically synthesized
aaaattattttctgcttgccaa

SEQ ID NO: 68706 - DNA, 22 bp, Artificial Sequence
  chemically synthesized
ttttctgcttgccaaaaaatat

SEQ ID NO: 68707 - DNA, 22 bp, Artificial Sequence
  chemically synthesized
tctgcttgccaaaaaatatttt

SEQ ID NO: 68708 - DNA, 22 bp, Artificial Sequence
  chemically synthesized
ctgcttgccaaaaaatattttc

SEQ ID NO: 68709 - DNA, 22 bp, Artificial Sequence
  chemically synthesized
tgcttgccaaaaaatattttca

SEQ ID NO: 68710 - DNA, 22 bp, Artificial Sequence
  chemically synthesized
cttgccaaaaaatattttcatt

SEQ ID NO: 68711 - DNA, 22 bp, Artificial Sequence
  chemically synthesized
gccaaaaaatattttcattcta

SEQ ID NO: 68712 - DNA, 22 bp, Artificial Sequence
  chemically synthesized
ccaaaaaatattttcattctaa

SEQ ID NO: 68713 - DNA, 22 bp, Artificial Sequence
  chemically synthesized
tcattctaaattcgattcccac

SEQ ID NO: 68714 - DNA, 22 bp, Artificial Sequence
  chemically synthesized
cattctaaattcgattcccaca

SEQ ID NO: 68715 - DNA, 22 bp, Artificial Sequence
  chemically synthesized
attctaaattcgattcccacaa

SEQ ID NO: 68716 - DNA, 22 bp, Artificial Sequence
  chemically synthesized
taaattcgattcccacaaaata

SEQ ID NO: 68717 - DNA, 22 bp, Artificial Sequence
  chemically synthesized
aattcgattcccacaaaataac

SEQ ID NO: 68718 - DNA, 22 bp, Artificial Sequence
  chemically synthesized
gattcccacaaaataaccattg

SEQ ID NO: 68719 - DNA, 22 bp, Artificial Sequence
  chemically synthesized
ccacaaaataaccattgaatga

SEQ ID NO: 68720 - DNA, 22 bp, Artificial Sequence
  chemically synthesized
aatgaatgaataaatgaacttg

SEQ ID NO: 68721 - DNA, 22 bp, Artificial Sequence
  chemically synthesized
gaggaggctcctgttccaaact

SEQ ID NO: 68722 - DNA, 22 bp, Artificial Sequence
  chemically synthesized
aggaggctcctgttccaaactt

SEQ ID NO: 68723 - DNA, 22 bp, Artificial Sequence
  chemically synthesized
ctgttccaaacttccaccagag

SEQ ID NO: 68724 - DNA, 22 bp, Artificial Sequence
  chemically synthesized
ttccaaacttccaccagagaag

SEQ ID NO: 68725 - DNA, 22 bp, Artificial Sequence
  chemically synthesized
caaacttccaccagagaagaaa

SEQ ID NO: 68726 - DNA, 22 bp, Artificial Sequence
  chemically synthesized
ccaccagagaagaaacatcctc

SEQ ID NO: 68727 - DNA, 22 bp, Artificial Sequence
  chemically synthesized
caccagagaagaaacatcctca

SEQ ID NO: 68728 - DNA, 22 bp, Artificial Sequence
  chemically synthesized
aagggcttggttcaggtggtca

SEQ ID NO: 68729 - DNA, 22 bp, Artificial Sequence
  chemically synthesized
ggttcaggtggtcatacagcct

SEQ ID NO: 68730 - DNA, 22 bp, Artificial Sequence
  chemically synthesized
gttcaggtggtcatacagcctc

SEQ ID NO: 68731 - DNA, 22 bp, Artificial Sequence
  chemically synthesized
aggtggtcatacagcctctgct

SEQ ID NO: 68732 - DNA, 22 bp, Artificial Sequence
  chemically synthesized
tgcttactcacctctcaggatg

SEQ ID NO: 68733 - DNA, 22 bp, Artificial Sequence
  chemically synthesized
cttactcacctctcaggatggg

SEQ ID NO: 68734 - DNA, 22 bp, Artificial Sequence
  chemically synthesized
actcacctctcaggatggggta

SEQ ID NO: 68735 - DNA, 22 bp, Artificial Sequence
  chemically synthesized
ctcacctctcaggatggggtac

SEQ ID NO: 68736 - DNA, 22 bp, Artificial Sequence
  chemically synthesized
acctctcaggatggggtactca

SEQ ID NO: 68737 - DNA, 22 bp, Artificial Sequence
  chemically synthesized
tcaggatggggtactcactatt

SEQ ID NO: 68738 - DNA, 22 bp, Artificial Sequence
  chemically synthesized
aggatggggtactcactatttc

SEQ ID NO: 68739 - DNA, 22 bp, Artificial Sequence
  chemically synthesized
actatttccagaacagttgttt

SEQ ID NO: 68740 - DNA, 22 bp, Artificial Sequence
  chemically synthesized
tttccagaacagttgttttgga

SEQ ID NO: 68741 - DNA, 22 bp, Artificial Sequence
  chemically synthesized
ccagaacagttgttttggagca

SEQ ID NO: 68742 - DNA, 22 bp, Artificial Sequence
  chemically synthesized
cagaacagttgttttggagcag

SEQ ID NO: 68743 - DNA, 22 bp, Artificial Sequence
  chemically synthesized
ttttggagcagtggtaacttga

SEQ ID NO: 68744 - DNA, 22 bp, Artificial Sequence
  chemically synthesized
tggagcagtggtaacttgaaat

SEQ ID NO: 68745 - DNA, 22 bp, Artificial Sequence
  chemically synthesized
ggagcagtggtaacttgaaatg

SEQ ID NO: 68746 - DNA, 22 bp, Artificial Sequence
  chemically synthesized
gagcagtggtaacttgaaatgc

SEQ ID NO: 68747 - DNA, 22 bp, Artificial Sequence
  chemically synthesized
gaaatgccctttcttatcctgg

SEQ ID NO: 68748 - DNA, 22 bp, Artificial Sequence
  chemically synthesized
aaatgccctttcttatcctggc

SEQ ID NO: 68749 - DNA, 22 bp, Artificial Sequence
  chemically synthesized
tcttatcctggccacaacccca

SEQ ID NO: 68750 - DNA, 22 bp, Artificial Sequence
  chemically synthesized
cttatcctggccacaaccccac

SEQ ID NO: 68751 - DNA, 22 bp, Artificial Sequence
  chemically synthesized
ttatcctggccacaaccccaca

SEQ ID NO: 68752 - DNA, 22 bp, Artificial Sequence
  chemically synthesized
atcctggccacaaccccacaac

SEQ ID NO: 68753 - DNA, 22 bp, Artificial Sequence
  chemically synthesized
tcctggccacaaccccacaaca

SEQ ID NO: 68754 - DNA, 22 bp, Artificial Sequence
  chemically synthesized
gccacaaccccacaacatccct

SEQ ID NO: 68755 - DNA, 22 bp, Artificial Sequence
  chemically synthesized
gagaaagtcaaaggctcaggga

SEQ ID NO: 68756 - DNA, 22 bp, Artificial Sequence
  chemically synthesized
agggaacaaggaagagggctat

SEQ ID NO: 68757 - DNA, 22 bp, Artificial Sequence
  chemically synthesized
tactgagctgagtaaggacttg

SEQ ID NO: 68758 - DNA, 22 bp, Artificial Sequence
  chemically synthesized
agctgagtaaggacttgccatc

SEQ ID NO: 68759 - DNA, 22 bp, Artificial Sequence
  chemically synthesized
agtaaggacttgccatcctgcc

SEQ ID NO: 68760 - DNA, 22 bp, Artificial Sequence
  chemically synthesized
gccatcctgccacccagcacac

SEQ ID NO: 68761 - DNA, 22 bp, Artificial Sequence
  chemically synthesized
ccatcctgccacccagcacact

SEQ ID NO: 68762 - DNA, 22 bp, Artificial Sequence
  chemically synthesized
ccacccagcacactcagacaga

SEQ ID NO: 68763 - DNA, 22 bp, Artificial Sequence
  chemically synthesized
agacagaagcgtgggcaggcag

SEQ ID NO: 68764 - DNA, 22 bp, Artificial Sequence
  chemically synthesized
tgagtggcagaattttcccctc

SEQ ID NO: 68765 - DNA, 22 bp, Artificial Sequence
  chemically synthesized
tcccctctgccccaggagctgt

SEQ ID NO: 68766 - DNA, 22 bp, Artificial Sequence
  chemically synthesized
cccctctgccccaggagctgtg

SEQ ID NO: 68767 - DNA, 22 bp, Artificial Sequence
  chemically synthesized
ccctctgccccaggagctgtgg

SEQ ID NO: 68768 - DNA, 22 bp, Artificial Sequence
  chemically synthesized
tgccccaggagctgtggtttgg

SEQ ID NO: 68769 - DNA, 22 bp, Artificial Sequence
  chemically synthesized
ccccaggagctgtggtttggag

SEQ ID NO: 68770 - DNA, 22 bp, Artificial Sequence
  chemically synthesized
tggtttggagcaaagacaatgt

SEQ ID NO: 68771 - DNA, 22 bp, Artificial Sequence
  chemically synthesized
ggagcaaagacaatgtcaccaa

SEQ ID NO: 68772 - DNA, 22 bp, Artificial Sequence
  chemically synthesized
gagcaaagacaatgtcaccaac

SEQ ID NO: 68773 - DNA, 22 bp, Artificial Sequence
  chemically synthesized
cagacagggacaaaactgcaag

SEQ ID NO: 68774 - DNA, 22 bp, Artificial Sequence
  chemically synthesized
caagtgatccccccggggcttg

SEQ ID NO: 68775 - DNA, 22 bp, Artificial Sequence
  chemically synthesized
gcattgtaagttcactcatggt

SEQ ID NO: 68776 - DNA, 22 bp, Artificial Sequence
  chemically synthesized
cattgtaagttcactcatggtc

SEQ ID NO: 68777 - DNA, 22 bp, Artificial Sequence
  chemically synthesized
taagttcactcatggtcaacag

SEQ ID NO: 68778 - DNA, 22 bp, Artificial Sequence
  chemically synthesized
actcatggtcaacagaactttc

SEQ ID NO: 68779 - DNA, 22 bp, Artificial Sequence
  chemically synthesized
atggtcaacagaactttccctt

SEQ ID NO: 68780 - DNA, 22 bp, Artificial Sequence
  chemically synthesized
tcccttcatctccccatctgct

SEQ ID NO: 68781 - DNA, 22 bp, Artificial Sequence
  chemically synthesized
cccttcatctccccatctgctg

SEQ ID NO: 68782 - DNA, 22 bp, Artificial Sequence
  chemically synthesized
ccttcatctccccatctgctgc

SEQ ID NO: 68783 - DNA, 22 bp, Artificial Sequence
  chemically synthesized
catctccccatctgctgccact

SEQ ID NO: 68784 - DNA, 22 bp, Artificial Sequence
  chemically synthesized
atctccccatctgctgccactg

SEQ ID NO: 68785 - DNA, 22 bp, Artificial Sequence
  chemically synthesized
cccatctgctgccactgagccg

SEQ ID NO: 68786 - DNA, 22 bp, Artificial Sequence
  chemically synthesized
ctgccactgagccgtagggacg

SEQ ID NO: 68787 - DNA, 22 bp, Artificial Sequence
  chemically synthesized
ccactgagccgtagggacgatt

SEQ ID NO: 68788 - DNA, 22 bp, Artificial Sequence
  chemically synthesized
agccgtagggacgattgtcacc

SEQ ID NO: 68789 - DNA, 22 bp, Artificial Sequence
  chemically synthesized
tcacctcccttttaaagattag

SEQ ID NO: 68790 - DNA, 22 bp, Artificial Sequence
  chemically synthesized
ccttttaaagattaggcaatgg

SEQ ID NO: 68791 - DNA, 22 bp, Artificial Sequence
  chemically synthesized
ttaaagattaggcaatggaggc

SEQ ID NO: 68792 - DNA, 22 bp, Artificial Sequence
  chemically synthesized
taaagattaggcaatggaggct

SEQ ID NO: 68793 - DNA, 22 bp, Artificial Sequence
  chemically synthesized
aaagattaggcaatggaggctc

SEQ ID NO: 68794 - DNA, 22 bp, Artificial Sequence
  chemically synthesized
aagattaggcaatggaggctca

SEQ ID NO: 68795 - DNA, 22 bp, Artificial Sequence
  chemically synthesized
ggcaatggaggctcaaggataa

SEQ ID NO: 68796 - DNA, 22 bp, Artificial Sequence
  chemically synthesized
aaggataagtgacttgtcaagc

SEQ ID NO: 68797 - DNA, 22 bp, Artificial Sequence
  chemically synthesized
gtcaagcaccacagctagtgag

SEQ ID NO: 68798 - DNA, 22 bp, Artificial Sequence
  chemically synthesized
tcaagcaccacagctagtgaga

SEQ ID NO: 68799 - DNA, 22 bp, Artificial Sequence
  chemically synthesized
gtgagaggaagccaagattcaa

SEQ ID NO: 68800 - DNA, 22 bp, Artificial Sequence
  chemically synthesized
aaccccacatctgactccaagc

SEQ ID NO: 68801 - DNA, 22 bp, Artificial Sequence
  chemically synthesized
actccaagctgggggacacaga

SEQ ID NO: 68802 - DNA, 22 bp, Artificial Sequence
  chemically synthesized
caagctgggggacacagaacct

SEQ ID NO: 68803 - DNA, 22 bp, Artificial Sequence
  chemically synthesized
ggggacacagaacctcagccaa

SEQ ID NO: 68804 - DNA, 22 bp, Artificial Sequence
  chemically synthesized
agccaagtcctgggctggtaat

SEQ ID NO: 68805 - DNA, 22 bp, Artificial Sequence
  chemically synthesized
ggctggtaatacttagaaaaag

SEQ ID NO: 68806 - DNA, 22 bp, Artificial Sequence
  chemically synthesized
gtaatacttagaaaaagctagt

SEQ ID NO: 68807 - DNA, 22 bp, Artificial Sequence
  chemically synthesized
agaaaaagctagtggtctcgcc

SEQ ID NO: 68808 - DNA, 22 bp, Artificial Sequence
  chemically synthesized
gaaaaagctagtggtctcgccc

SEQ ID NO: 68809 - DNA, 22 bp, Artificial Sequence
  chemically synthesized
gtggtctcgccccgggaagaag

SEQ ID NO: 68810 - DNA, 22 bp, Artificial Sequence
  chemically synthesized
gccccgggaagaagcttcccac

SEQ ID NO: 68811 - DNA, 22 bp, Artificial Sequence
  chemically synthesized
cccacagcctgagggccagaag

SEQ ID NO: 68812 - DNA, 22 bp, Artificial Sequence
  chemically synthesized
ccacagcctgagggccagaagc

SEQ ID NO: 68813 - DNA, 22 bp, Artificial Sequence
  chemically synthesized
agggccagaagctggcagagtt

SEQ ID NO: 68814 - DNA, 22 bp, Artificial Sequence
  chemically synthesized
gcagagttgttgagcaaactcg

SEQ ID NO: 68815 - DNA, 22 bp, Artificial Sequence
  chemically synthesized
ttgagcaaactcgccccgcaca

SEQ ID NO: 68816 - DNA, 22 bp, Artificial Sequence
  chemically synthesized
agcaaactcgccccgcacacgg

SEQ ID NO: 68817 - DNA, 22 bp, Artificial Sequence
  chemically synthesized
gccccgcacacggtcggcagac

SEQ ID NO: 68818 - DNA, 22 bp, Artificial Sequence
  chemically synthesized
aggcgccgggctcagctccggg

SEQ ID NO: 68819 - DNA, 22 bp, Artificial Sequence
  chemically synthesized
agctccggggtcccagtaccag

SEQ ID NO: 68820 - DNA, 22 bp, Artificial Sequence
  chemically synthesized
cggggtcccagtaccaggcgca

SEQ ID NO: 68821 - DNA, 22 bp, Artificial Sequence
  chemically synthesized
cggctccagagcaccaagggcc

SEQ ID NO: 68822 - DNA, 22 bp, Artificial Sequence
  chemically synthesized
cagagcaccaagggcccttccc

SEQ ID NO: 68823 - DNA, 22 bp, Artificial Sequence
  chemically synthesized
ccctgcctgagtcctaaaggac

SEQ ID NO: 68824 - DNA, 22 bp, Artificial Sequence
  chemically synthesized
cctgcctgagtcctaaaggacg

SEQ ID NO: 68825 - DNA, 22 bp, Artificial Sequence
  chemically synthesized
cctgagtcctaaaggacgccaa

SEQ ID NO: 68826 - DNA, 22 bp, Artificial Sequence
  chemically synthesized
agtcctaaaggacgccaatggg

SEQ ID NO: 68827 - DNA, 22 bp, Artificial Sequence
  chemically synthesized
aaggacgccaatgggcctcgag

SEQ ID NO: 68828 - DNA, 22 bp, Artificial Sequence
  chemically synthesized
gagaatacctccgccccttctc

SEQ ID NO: 68829 - DNA, 22 bp, Artificial Sequence
  chemically synthesized
cgccccttctcccctgcccctt

SEQ ID NO: 68830 - DNA, 22 bp, Artificial Sequence
  chemically synthesized
ctcccctgccccttcagctggt

SEQ ID NO: 68831 - DNA, 22 bp, Artificial Sequence
  chemically synthesized
tcccctgccccttcagctggtt

SEQ ID NO: 68832 - DNA, 22 bp, Artificial Sequence
  chemically synthesized
ccctgccccttcagctggttct

SEQ ID NO: 68833 - DNA, 22 bp, Artificial Sequence
  chemically synthesized
ccccttcagctggttcttttct

SEQ ID NO: 68834 - DNA, 22 bp, Artificial Sequence
  chemically synthesized
cagctggttcttttcttcggct

SEQ ID NO: 68835 - DNA, 22 bp, Artificial Sequence
  chemically synthesized
agctggttcttttcttcggctg

SEQ ID NO: 68836 - DNA, 22 bp, Artificial Sequence
  chemically synthesized
gttcttttcttcggctgaaaca

SEQ ID NO: 68837 - DNA, 22 bp, Artificial Sequence
  chemically synthesized
ttttcttcggctgaaacagatg

SEQ ID NO: 68838 - DNA, 22 bp, Artificial Sequence
  chemically synthesized
ttcttcggctgaaacagatgga

SEQ ID NO: 68839 - DNA, 22 bp, Artificial Sequence
  chemically synthesized
tcttcggctgaaacagatggaa

SEQ ID NO: 68840 - DNA, 22 bp, Artificial Sequence
  chemically synthesized
cttcggctgaaacagatggaat

SEQ ID NO: 68841 - DNA, 22 bp, Artificial Sequence
  chemically synthesized
ttcggctgaaacagatggaata

SEQ ID NO: 68842 - DNA, 22 bp, Artificial Sequence
  chemically synthesized
cggctgaaacagatggaatact

SEQ ID NO: 68843 - DNA, 22 bp, Artificial Sequence
  chemically synthesized
ggctgaaacagatggaatacta

SEQ ID NO: 68844 - DNA, 22 bp, Artificial Sequence
  chemically synthesized
aaacagatggaatactagagca

SEQ ID NO: 68845 - DNA, 22 bp, Artificial Sequence
  chemically synthesized
gagcatgagttctgtgtcataa

SEQ ID NO: 68846 - DNA, 22 bp, Artificial Sequence
  chemically synthesized
tgtgtcataaagaaattgcctc

SEQ ID NO: 68847 - DNA, 22 bp, Artificial Sequence
  chemically synthesized
tgtcataaagaaattgcctcgt

SEQ ID NO: 68848 - DNA, 22 bp, Artificial Sequence
  chemically synthesized
cctcgtgctcccagcatctgcc

SEQ ID NO: 68849 - DNA, 22 bp, Artificial Sequence
  chemically synthesized
gtgctcccagcatctgccgtcc

SEQ ID NO: 68850 - DNA, 22 bp, Artificial Sequence
  chemically synthesized
ccagcatctgccgtccttccca

SEQ ID NO: 68851 - DNA, 22 bp, Artificial Sequence
  chemically synthesized
ccgtccttcccaccccgcccct

SEQ ID NO: 68852 - DNA, 22 bp, Artificial Sequence
  chemically synthesized
cccaccccgcccctgtctcggg

SEQ ID NO: 68853 - DNA, 22 bp, Artificial Sequence
  chemically synthesized
ccaccccgcccctgtctcgggt

SEQ ID NO: 68854 - DNA, 22 bp, Artificial Sequence
  chemically synthesized
tctcgggtagggccttctctcc

SEQ ID NO: 68855 - DNA, 22 bp, Artificial Sequence
  chemically synthesized
gggtagggccttctctccaggc

SEQ ID NO: 68856 - DNA, 22 bp, Artificial Sequence
  chemically synthesized
ctctccaggccctccaccctcc

SEQ ID NO: 68857 - DNA, 22 bp, Artificial Sequence
  chemically synthesized
tctccaggccctccaccctccg

SEQ ID NO: 68858 - DNA, 22 bp, Artificial Sequence
  chemically synthesized
tccaggccctccaccctccgct

SEQ ID NO: 68859 - DNA, 22 bp, Artificial Sequence
  chemically synthesized
caggccctccaccctccgctgc

SEQ ID NO: 68860 - DNA, 22 bp, Artificial Sequence
  chemically synthesized
caccctccgctgcccatgtttt

SEQ ID NO: 68861 - DNA, 22 bp, Artificial Sequence
  chemically synthesized
cgctgcccatgttttccaaacc

SEQ ID NO: 68862 - DNA, 22 bp, Artificial Sequence
  chemically synthesized
cccatgttttccaaaccaaatc

SEQ ID NO: 68863 - DNA, 22 bp, Artificial Sequence
  chemically synthesized
tccaaaccaaatcggaacccac

SEQ ID NO: 68864 - DNA, 22 bp, Artificial Sequence
  chemically synthesized
ccaaaccaaatcggaacccact

SEQ ID NO: 68865 - DNA, 22 bp, Artificial Sequence
  chemically synthesized
caaaccaaatcggaacccacta

SEQ ID NO: 68866 - DNA, 22 bp, Artificial Sequence
  chemically synthesized
taatggcaagcccgctttctct

SEQ ID NO: 68867 - DNA, 22 bp, Artificial Sequence
  chemically synthesized
tctctgtgcctggtgcagttcc

SEQ ID NO: 68868 - DNA, 22 bp, Artificial Sequence
  chemically synthesized
ctctgtgcctggtgcagttccc

SEQ ID NO: 68869 - DNA, 22 bp, Artificial Sequence
  chemically synthesized
tctgtgcctggtgcagttccca

SEQ ID NO: 68870 - DNA, 22 bp, Artificial Sequence
  chemically synthesized
tgtgcctggtgcagttcccagt

SEQ ID NO: 68871 - DNA, 22 bp, Artificial Sequence
  chemically synthesized
tgcctggtgcagttcccagtac

SEQ ID NO: 68872 - DNA, 22 bp, Artificial Sequence
  chemically synthesized
gtgcagttcccagtacgttcca

SEQ ID NO: 68873 - DNA, 22 bp, Artificial Sequence
  chemically synthesized
ccagtacgttccaggcattcac

SEQ ID NO: 68874 - DNA, 22 bp, Artificial Sequence
  chemically synthesized
caggcattcactccttcaccca

SEQ ID NO: 68875 - DNA, 22 bp, Artificial Sequence
  chemically synthesized
actccttcacccacctgtgccg

SEQ ID NO: 68876 - DNA, 22 bp, Artificial Sequence
  chemically synthesized
cttcacccacctgtgccgcggc

SEQ ID NO: 68877 - DNA, 22 bp, Artificial Sequence
  chemically synthesized
cacccacctgtgccgcggcgag

SEQ ID NO: 68878 - DNA, 22 bp, Artificial Sequence
  chemically synthesized
acccacctgtgccgcggcgagg

SEQ ID NO: 68879 - DNA, 22 bp, Artificial Sequence
  chemically synthesized
tgccgcggcgaggcagaaactg

SEQ ID NO: 68880 - DNA, 22 bp, Artificial Sequence
  chemically synthesized
ggaaatctgggcaggatatcct

SEQ ID NO: 68881 - DNA, 22 bp, Artificial Sequence
  chemically synthesized
ggcaggatatcctggcagtgct

SEQ ID NO: 68882 - DNA, 22 bp, Artificial Sequence
  chemically synthesized
gcagtgctctgctcgcccttcc

SEQ ID NO: 68883 - DNA, 22 bp, Artificial Sequence
  chemically synthesized
tgctcgcccttcctcggcctcc

SEQ ID NO: 68884 - DNA, 22 bp, Artificial Sequence
  chemically synthesized
ctcgcccttcctcggcctccgg

SEQ ID NO: 68885 - DNA, 22 bp, Artificial Sequence
  chemically synthesized
gcccttcctcggcctccgggtc

SEQ ID NO: 68886 - DNA, 22 bp, Artificial Sequence
  chemically synthesized
cctcggcctccgggtctcccaa

SEQ ID NO: 68887 - DNA, 22 bp, Artificial Sequence
  chemically synthesized
ctcggcctccgggtctcccaac

SEQ ID NO: 68888 - DNA, 22 bp, Artificial Sequence
  chemically synthesized
ggcctccgggtctcccaacccc

SEQ ID NO: 68889 - DNA, 22 bp, Artificial Sequence
  chemically synthesized
cgggtctcccaaccccgcgaac

SEQ ID NO: 68890 - DNA, 22 bp, Artificial Sequence
  chemically synthesized
ccaaccccgcgaaccttcccac

SEQ ID NO: 68891 - DNA, 22 bp, Artificial Sequence
  chemically synthesized
cccactgaatagcgcagccgca

SEQ ID NO: 68892 - DNA, 22 bp, Artificial Sequence
  chemically synthesized
ccactgaatagcgcagccgcac

SEQ ID NO: 68893 - DNA, 22 bp, Artificial Sequence
  chemically synthesized
aatagcgcagccgcacgcccca

SEQ ID NO: 68894 - DNA, 22 bp, Artificial Sequence
  chemically synthesized
tccaccgtgctccccactaccc

SEQ ID NO: 68895 - DNA, 22 bp, Artificial Sequence
  chemically synthesized
caccgtgctccccactacccgt

SEQ ID NO: 68896 - DNA, 22 bp, Artificial Sequence
  chemically synthesized
cccactacccgtcctcccccgc

SEQ ID NO: 68897 - DNA, 22 bp, Artificial Sequence
  chemically synthesized
cccgtcctcccccgccgccttg

SEQ ID NO: 68898 - DNA, 22 bp, Artificial Sequence
  chemically synthesized
ccccgccgccttgcctgcagtc

SEQ ID NO: 68899 - DNA, 22 bp, Artificial Sequence
  chemically synthesized
gcctgcagtccccaagatcgtg

SEQ ID NO: 68900 - DNA, 22 bp, Artificial Sequence
  chemically synthesized
cctgcagtccccaagatcgtgc

SEQ ID NO: 68901 - DNA, 22 bp, Artificial Sequence
  chemically synthesized
cagtccccaagatcgtgccaag

SEQ ID NO: 68902 - DNA, 22 bp, Artificial Sequence
  chemically synthesized
ggcgacctgcactccacttcct

SEQ ID NO: 68903 - DNA, 22 bp, Artificial Sequence
  chemically synthesized
cactccacttcctctcttacat

SEQ ID NO: 68904 - DNA, 22 bp, Artificial Sequence
  chemically synthesized
cacttcctctcttacatggggg

SEQ ID NO: 68905 - DNA, 22 bp, Artificial Sequence
  chemically synthesized
cctctcttacatggggggaaac

SEQ ID NO: 68906 - DNA, 22 bp, Artificial Sequence
  chemically synthesized
ctctcttacatggggggaaact

SEQ ID NO: 68907 - DNA, 22 bp, Artificial Sequence
  chemically synthesized
tcttacatggggggaaactgag

SEQ ID NO: 68908 - DNA, 22 bp, Artificial Sequence
  chemically synthesized
ttacatggggggaaactgaggc

SEQ ID NO: 68909 - DNA, 22 bp, Artificial Sequence
  chemically synthesized
acatggggggaaactgaggccc

SEQ ID NO: 68910 - DNA, 22 bp, Artificial Sequence
  chemically synthesized
catggggggaaactgaggcccg

SEQ ID NO: 68911 - DNA, 22 bp, Artificial Sequence
  chemically synthesized
aggcccgagaggaaacagcacc

SEQ ID NO: 68912 - DNA, 22 bp, Artificial Sequence
  chemically synthesized
cgggttcgccccggcctcccat

SEQ ID NO: 68913 - DNA, 22 bp, Artificial Sequence
  chemically synthesized
gccccggcctcccatccctaca

SEQ ID NO: 68914 - DNA, 22 bp, Artificial Sequence
  chemically synthesized
ccatccctacacccgcaccttg

SEQ ID NO: 68915 - DNA, 22 bp, Artificial Sequence
  chemically synthesized
cacccgcaccttggcgcagcgg

SEQ ID NO: 68916 - DNA, 22 bp, Artificial Sequence
  chemically synthesized
ggcgcagcggtggaaggtggct

SEQ ID NO: 68917 - DNA, 22 bp, Artificial Sequence
  chemically synthesized
gcgcagcggtggaaggtggctg

SEQ ID NO: 68918 - DNA, 22 bp, Artificial Sequence
  chemically synthesized
tggttccgtgctcgggtgcttc

SEQ ID NO: 68919 - DNA, 22 bp, Artificial Sequence
  chemically synthesized
cgtgctcgggtgcttcggccag

SEQ ID NO: 68920 - DNA, 22 bp, Artificial Sequence
  chemically synthesized
gggtgcttcggccaggccgtcc

SEQ ID NO: 68921 - DNA, 22 bp, Artificial Sequence
  chemically synthesized
cggccaggccgtcctcctcgga

SEQ ID NO: 68922 - DNA, 22 bp, Artificial Sequence
  chemically synthesized
ggccaggccgtcctcctcggaa

SEQ ID NO: 68923 - DNA, 22 bp, Artificial Sequence
  chemically synthesized
ctcggaacgcaaggctagcacc

SEQ ID NO: 68924 - DNA, 22 bp, Artificial Sequence
  chemically synthesized
ggaacgcaaggctagcaccagc

SEQ ID NO: 68925 - DNA, 22 bp, Artificial Sequence
  chemically synthesized
gcaccagctcctcgtagtcgcc

SEQ ID NO: 68926 - DNA, 22 bp, Artificial Sequence
  chemically synthesized
ctcgtagtcgccgtcctcgtcc

SEQ ID NO: 68927 - DNA, 22 bp, Artificial Sequence
  chemically synthesized
gtagtcgccgtcctcgtcctcc

SEQ ID NO: 68928 - DNA, 22 bp, Artificial Sequence
  chemically synthesized
gtcctcctgcgcacgggcgccc

SEQ ID NO: 68929 - DNA, 22 bp, Artificial Sequence
  chemically synthesized
ctgcgcacgggcgcccgcggga

SEQ ID NO: 68930 - DNA, 22 bp, Artificial Sequence
  chemically synthesized
cgcacgggcgcccgcgggaccc

SEQ ID NO: 68931 - DNA, 22 bp, Artificial Sequence
  chemically synthesized
gagctgacggtgcccatgaggg

SEQ ID NO: 68932 - DNA, 22 bp, Artificial Sequence
  chemically synthesized
acggtgcccatgagggccaggg

SEQ ID NO: 68933 - DNA, 22 bp, Artificial Sequence
  chemically synthesized
ctgtcctggcgaggagacctag

SEQ ID NO: 68934 - DNA, 22 bp, Artificial Sequence
  chemically synthesized
tcctggcgaggagacctagagg

SEQ ID NO: 68935 - DNA, 22 bp, Artificial Sequence
  chemically synthesized
gcgaggagacctagaggccgtg

SEQ ID NO: 68936 - DNA, 22 bp, Artificial Sequence
  chemically synthesized
gaggccgtgcgcggtccacgcc

SEQ ID NO: 68937 - DNA, 22 bp, Artificial Sequence
  chemically synthesized
gagccttgcggtggggaggact

SEQ ID NO: 68938 - DNA, 22 bp, Artificial Sequence
  chemically synthesized
agccttgcggtggggaggactg

SEQ ID NO: 68939 - DNA, 22 bp, Artificial Sequence
  chemically synthesized
gcggtggggaggactgtgcagg

SEQ ID NO: 68940 - DNA, 22 bp, Artificial Sequence
  chemically synthesized
cggtggggaggactgtgcagga

SEQ ID NO: 68941 - DNA, 22 bp, Artificial Sequence
  chemically synthesized
tgcaggagctgaagttcaggag

SEQ ID NO: 68942 - DNA, 22 bp, Artificial Sequence
  chemically synthesized
aagttcaggagcagggcgcgtg

SEQ ID NO: 68943 - DNA, 22 bp, Artificial Sequence
  chemically synthesized
aggagcagggcgcgtgaagggg

SEQ ID NO: 68944 - DNA, 22 bp, Artificial Sequence
  chemically synthesized
gctgggagctgggagccgctgc

SEQ ID NO: 68945 - DNA, 22 bp, Artificial Sequence
  chemically synthesized
ggagctgggagccgctgctgca

SEQ ID NO: 68946 - DNA, 22 bp, Artificial Sequence
  chemically synthesized
ggagccgctgctgcaacgacgc

SEQ ID NO: 68947 - DNA, 22 bp, Artificial Sequence
  chemically synthesized
ctgcaacgacgcgtcccggccc

SEQ ID NO: 68948 - DNA, 22 bp, Artificial Sequence
  chemically synthesized
caacgacgcgtcccggcccgcc

SEQ ID NO: 68949 - DNA, 22 bp, Artificial Sequence
  chemically synthesized
actgcctggctcactcctccag

SEQ ID NO: 68950 - DNA, 22 bp, Artificial Sequence
  chemically synthesized
cctggctcactcctccaggctc

SEQ ID NO: 68951 - DNA, 22 bp, Artificial Sequence
  chemically synthesized
gctcactcctccaggctcagac

SEQ ID NO: 68952 - DNA, 22 bp, Artificial Sequence
  chemically synthesized
actcctccaggctcagaccctg

SEQ ID NO: 68953 - DNA, 22 bp, Artificial Sequence
  chemically synthesized
ctccaggctcagaccctgaact

SEQ ID NO: 68954 - DNA, 22 bp, Artificial Sequence
  chemically synthesized
caggctcagaccctgaactgaa

SEQ ID NO: 68955 - DNA, 22 bp, Artificial Sequence
  chemically synthesized
agaccctgaactgaacggcggc

SEQ ID NO: 68956 - DNA, 22 bp, Artificial Sequence
  chemically synthesized
aactgaacggcggcgcccgcct

SEQ ID NO: 68957 - DNA, 22 bp, Artificial Sequence
  chemically synthesized
aacggcggcgcccgcctgcaac

SEQ ID NO: 68958 - DNA, 22 bp, Artificial Sequence
  chemically synthesized
caaccatgagcgcctcgacgtc

SEQ ID NO: 68959 - DNA, 22 bp, Artificial Sequence
  chemically synthesized
gacgtcgctgcggaaaccttct

SEQ ID NO: 68960 - DNA, 22 bp, Artificial Sequence
  chemically synthesized
cggaaaccttctagggtgtggg

SEQ ID NO: 68961 - DNA, 22 bp, Artificial Sequence
  chemically synthesized
ctagggtgtgggtgcttgacgc

SEQ ID NO: 68962 - DNA, 22 bp, Artificial Sequence
  chemically synthesized
tagggtgtgggtgcttgacgcc

SEQ ID NO: 68963 - DNA, 22 bp, Artificial Sequence
  chemically synthesized
gggtgtgggtgcttgacgcctg

SEQ ID NO: 68964 - DNA, 22 bp, Artificial Sequence
  chemically synthesized
gacgcctggggcgcgcagatca

SEQ ID NO: 68965 - DNA, 22 bp, Artificial Sequence
  chemically synthesized
acgcctggggcgcgcagatcac

SEQ ID NO: 68966 - DNA, 22 bp, Artificial Sequence
  chemically synthesized
gggcgcgcagatcacgccacca

SEQ ID NO: 68967 - DNA, 22 bp, Artificial Sequence
  chemically synthesized
tctgattaaacattaacggaac

SEQ ID NO: 68968 - DNA, 22 bp, Artificial Sequence
  chemically synthesized
attaaacattaacggaaccccc

SEQ ID NO: 68969 - DNA, 22 bp, Artificial Sequence
  chemically synthesized
aacattaacggaacccccggac

SEQ ID NO: 68970 - DNA, 22 bp, Artificial Sequence
  chemically synthesized
acggaacccccggactggagga

SEQ ID NO: 68971 - DNA, 22 bp, Artificial Sequence
  chemically synthesized
gaggatcaggtttcggcctcgc

SEQ ID NO: 68972 - DNA, 22 bp, Artificial Sequence
  chemically synthesized
cggcctcgccctccccaaacag

SEQ ID NO: 68973 - DNA, 22 bp, Artificial Sequence
  chemically synthesized
ggcctcgccctccccaaacagc

SEQ ID NO: 68974 - DNA, 22 bp, Artificial Sequence
  chemically synthesized
gccctccccaaacagcgtcaga

SEQ ID NO: 68975 - DNA, 22 bp, Artificial Sequence
  chemically synthesized
cccaaacagcgtcagattacgc

SEQ ID NO: 68976 - DNA, 22 bp, Artificial Sequence
  chemically synthesized
cgcgcagagggaagaaaaaact

SEQ ID NO: 68977 - DNA, 22 bp, Artificial Sequence
  chemically synthesized
ccaaatcctaactgggctggaa

SEQ ID NO: 68978 - DNA, 22 bp, Artificial Sequence
  chemically synthesized
actgggctggaaggcaggccgg

SEQ ID NO: 68979 - DNA, 22 bp, Artificial Sequence
  chemically synthesized
ggctggaaggcaggccggcgcc

SEQ ID NO: 68980 - DNA, 22 bp, Artificial Sequence
  chemically synthesized
gaaggcaggccggcgccctagg

SEQ ID NO: 68981 - DNA, 22 bp, Artificial Sequence
  chemically synthesized
ggggctcctcctctcccgcctc

SEQ ID NO: 68982 - DNA, 22 bp, Artificial Sequence
  chemically synthesized
ctcctctcccgcctctcaccct

SEQ ID NO: 68983 - DNA, 22 bp, Artificial Sequence
  chemically synthesized
ctctcccgcctctcaccctgcg

SEQ ID NO: 68984 - DNA, 22 bp, Artificial Sequence
  chemically synthesized
tcccgcctctcaccctgcgtgg

SEQ ID NO: 68985 - DNA, 22 bp, Artificial Sequence
  chemically synthesized
ccgcctctcaccctgcgtggga

SEQ ID NO: 68986 - DNA, 22 bp, Artificial Sequence
  chemically synthesized
tcaccctgcgtgggatgccaga

SEQ ID NO: 68987 - DNA, 22 bp, Artificial Sequence
  chemically synthesized
accctgcgtgggatgccagact

SEQ ID NO: 68988 - DNA, 22 bp, Artificial Sequence
  chemically synthesized
cgtgggatgccagactccaagt

SEQ ID NO: 68989 - DNA, 22 bp, Artificial Sequence
  chemically synthesized
caagttctgccgggcccacctt

SEQ ID NO: 68990 - DNA, 22 bp, Artificial Sequence
  chemically synthesized
tgccgggcccaccttttcagtg

SEQ ID NO: 68991 - DNA, 22 bp, Artificial Sequence
  chemically synthesized
ccgggcccaccttttcagtgtt

SEQ ID NO: 68992 - DNA, 22 bp, Artificial Sequence
  chemically synthesized
ttcagtgtttcctgggtccacc

SEQ ID NO: 68993 - DNA, 22 bp, Artificial Sequence
  chemically synthesized
tcagtgtttcctgggtccacct

SEQ ID NO: 68994 - DNA, 22 bp, Artificial Sequence
  chemically synthesized
cagtgtttcctgggtccacctt

SEQ ID NO: 68995 - DNA, 22 bp, Artificial Sequence
  chemically synthesized
agtgtttcctgggtccaccttg

SEQ ID NO: 68996 - DNA, 22 bp, Artificial Sequence
  chemically synthesized
cctgggtccaccttgtctcctg

SEQ ID NO: 68997 - DNA, 22 bp, Artificial Sequence
  chemically synthesized
ctgggtccaccttgtctcctgc

SEQ ID NO: 68998 - DNA, 22 bp, Artificial Sequence
  chemically synthesized
ggtccaccttgtctcctgctga

SEQ ID NO: 68999 - DNA, 22 bp, Artificial Sequence
  chemically synthesized
gtctcctgctgaccagtgagac

SEQ ID NO: 69000 - DNA, 22 bp, Artificial Sequence
  chemically synthesized
tctcctgctgaccagtgagact

SEQ ID NO: 69001 - DNA, 22 bp, Artificial Sequence
  chemically synthesized
ctgctgaccagtgagacttctg

SEQ ID NO: 69002 - DNA, 22 bp, Artificial Sequence
  chemically synthesized
ctgaccagtgagacttctgaat

SEQ ID NO: 69003 - DNA, 22 bp, Artificial Sequence
  chemically synthesized
accagtgagacttctgaatcaa

SEQ ID NO: 69004 - DNA, 22 bp, Artificial Sequence
  chemically synthesized
ctgaatcaatcctactgtggac

SEQ ID NO: 69005 - DNA, 22 bp, Artificial Sequence
  chemically synthesized
tgaatcaatcctactgtggact

SEQ ID NO: 69006 - DNA, 22 bp, Artificial Sequence
  chemically synthesized
aatcaatcctactgtggactcc

SEQ ID NO: 69007 - DNA, 22 bp, Artificial Sequence
  chemically synthesized
ctgtggactcctcgctgcccac

SEQ ID NO: 69008 - DNA, 22 bp, Artificial Sequence
  chemically synthesized
tggactcctcgctgcccaccga

SEQ ID NO: 69009 - DNA, 22 bp, Artificial Sequence
  chemically synthesized
ctcgctgcccaccgaattcttt

SEQ ID NO: 69010 - DNA, 22 bp, Artificial Sequence
  chemically synthesized
gctgcccaccgaattctttcca

SEQ ID NO: 69011 - DNA, 22 bp, Artificial Sequence
  chemically synthesized
cccaccgaattctttccactgg

SEQ ID NO: 69012 - DNA, 22 bp, Artificial Sequence
  chemically synthesized
tttccactggccttaacctggc

SEQ ID NO: 69013 - DNA, 22 bp, Artificial Sequence
  chemically synthesized
tccactggccttaacctggcag

SEQ ID NO: 69014 - DNA, 22 bp, Artificial Sequence
  chemically synthesized
ccactggccttaacctggcagc

SEQ ID NO: 69015 - DNA, 22 bp, Artificial Sequence
  chemically synthesized
cactggccttaacctggcagcc

SEQ ID NO: 69016 - DNA, 22 bp, Artificial Sequence
  chemically synthesized
gccttaacctggcagccttcta

SEQ ID NO: 69017 - DNA, 22 bp, Artificial Sequence
  chemically synthesized
aacctggcagccttctaaactt

SEQ ID NO: 69018 - DNA, 22 bp, Artificial Sequence
  chemically synthesized
acctggcagccttctaaactta

SEQ ID NO: 69019 - DNA, 22 bp, Artificial Sequence
  chemically synthesized
gcagccttctaaacttagcctg

SEQ ID NO: 69020 - DNA, 22 bp, Artificial Sequence
  chemically synthesized
ctaaacttagcctggaccccct

SEQ ID NO: 69021 - DNA, 22 bp, Artificial Sequence
  chemically synthesized
taaacttagcctggaccccctc

SEQ ID NO: 69022 - DNA, 22 bp, Artificial Sequence
  chemically synthesized
aacttagcctggaccccctccg

SEQ ID NO: 69023 - DNA, 22 bp, Artificial Sequence
  chemically synthesized
agcctggaccccctccggcctc

SEQ ID NO: 69024 - DNA, 22 bp, Artificial Sequence
  chemically synthesized
gcctggaccccctccggcctct

SEQ ID NO: 69025 - DNA, 22 bp, Artificial Sequence
  chemically synthesized
gaccccctccggcctctgccct

SEQ ID NO: 69026 - DNA, 22 bp, Artificial Sequence
  chemically synthesized
cggcctctgccctttatgcacc

SEQ ID NO: 69027 - DNA, 22 bp, Artificial Sequence
  chemically synthesized
tgccctttatgcaccctgcaca

SEQ ID NO: 69028 - DNA, 22 bp, Artificial Sequence
  chemically synthesized
ccctttatgcaccctgcacact

SEQ ID NO: 69029 - DNA, 22 bp, Artificial Sequence
  chemically synthesized
tatgcaccctgcacactgacct

SEQ ID NO: 69030 - DNA, 22 bp, Artificial Sequence
  chemically synthesized
atgcaccctgcacactgacctt

SEQ ID NO: 69031 - DNA, 22 bp, Artificial Sequence
  chemically synthesized
tgcaccctgcacactgacctta

SEQ ID NO: 69032 - DNA, 22 bp, Artificial Sequence
  chemically synthesized
cacactgaccttaccaactagc

SEQ ID NO: 69033 - DNA, 22 bp, Artificial Sequence
  chemically synthesized
accttaccaactagctgctcct

SEQ ID NO: 69034 - DNA, 22 bp, Artificial Sequence
  chemically synthesized
accaactagctgctccttgaag

SEQ ID NO: 69035 - DNA, 22 bp, Artificial Sequence
  chemically synthesized
ccaactagctgctccttgaaga

SEQ ID NO: 69036 - DNA, 22 bp, Artificial Sequence
  chemically synthesized
gctgctccttgaagagattgct

SEQ ID NO: 69037 - DNA, 22 bp, Artificial Sequence
  chemically synthesized
ctccttgaagagattgcttgct

SEQ ID NO: 69038 - DNA, 22 bp, Artificial Sequence
  chemically synthesized
cttgaagagattgcttgctttt

SEQ ID NO: 69039 - DNA, 22 bp, Artificial Sequence
  chemically synthesized
gaagagattgcttgcttttgat

SEQ ID NO: 69040 - DNA, 22 bp, Artificial Sequence
  chemically synthesized
aagagattgcttgcttttgatg

SEQ ID NO: 69041 - DNA, 22 bp, Artificial Sequence
  chemically synthesized
cttgcttttgatgtccagccta

SEQ ID NO: 69042 - DNA, 22 bp, Artificial Sequence
  chemically synthesized
gcttttgatgtccagcctacat

SEQ ID NO: 69043 - DNA, 22 bp, Artificial Sequence
  chemically synthesized
cttttgatgtccagcctacatg

SEQ ID NO: 69044 - DNA, 22 bp, Artificial Sequence
  chemically synthesized
ttgatgtccagcctacatgcat

SEQ ID NO: 69045 - DNA, 22 bp, Artificial Sequence
  chemically synthesized
tgatgtccagcctacatgcatt

SEQ ID NO: 69046 - DNA, 22 bp, Artificial Sequence
  chemically synthesized
gatgtccagcctacatgcattt

SEQ ID NO: 69047 - DNA, 22 bp, Artificial Sequence
  chemically synthesized
atgtccagcctacatgcatttc

SEQ ID NO: 69048 - DNA, 22 bp, Artificial Sequence
  chemically synthesized
catgcatttcaagggatttata

SEQ ID NO: 69049 - DNA, 22 bp, Artificial Sequence
  chemically synthesized
caagggatttatactacaaaga

SEQ ID NO: 69050 - DNA, 22 bp, Artificial Sequence
  chemically synthesized
aagggatttatactacaaagat

SEQ ID NO: 69051 - DNA, 22 bp, Artificial Sequence
  chemically synthesized
atactacaaagattcaggtttt

SEQ ID NO: 69052 - DNA, 22 bp, Artificial Sequence
  chemically synthesized
tactacaaagattcaggtttta

SEQ ID NO: 69053 - DNA, 22 bp, Artificial Sequence
  chemically synthesized
caaagattcaggttttaagttt

SEQ ID NO: 69054 - DNA, 22 bp, Artificial Sequence
  chemically synthesized
aggttttaagtttgcaaagacg

SEQ ID NO: 69055 - DNA, 22 bp, Artificial Sequence
  chemically synthesized
taagtttgcaaagacgtcatat

SEQ ID NO: 69056 - DNA, 22 bp, Artificial Sequence
  chemically synthesized
aagtttgcaaagacgtcatata

SEQ ID NO: 69057 - DNA, 22 bp, Artificial Sequence
  chemically synthesized
agtttgcaaagacgtcatatag

SEQ ID NO: 69058 - DNA, 22 bp, Artificial Sequence
  chemically synthesized
gcaaagacgtcatataggtaca

SEQ ID NO: 69059 - DNA, 22 bp, Artificial Sequence
  chemically synthesized
caaagacgtcatataggtacat

SEQ ID NO: 69060 - DNA, 22 bp, Artificial Sequence
  chemically synthesized
agaattctatggtaggcacaag

SEQ ID NO: 69061 - DNA, 22 bp, Artificial Sequence
  chemically synthesized
tatggtaggcacaagctcagct

SEQ ID NO: 69062 - DNA, 22 bp, Artificial Sequence
  chemically synthesized
tggtaggcacaagctcagcttt

SEQ ID NO: 69063 - DNA, 22 bp, Artificial Sequence
  chemically synthesized
agctttccagaagattcaattt

SEQ ID NO: 69064 - DNA, 22 bp, Artificial Sequence
  chemically synthesized
tccagaagattcaatttgcaaa

SEQ ID NO: 69065 - DNA, 22 bp, Artificial Sequence
  chemically synthesized
ccagaagattcaatttgcaaag

SEQ ID NO: 69066 - DNA, 22 bp, Artificial Sequence
  chemically synthesized
cagaagattcaatttgcaaaga

SEQ ID NO: 69067 - DNA, 22 bp, Artificial Sequence
  chemically synthesized
aatttgcaaagattccttttac

SEQ ID NO: 69068 - DNA, 22 bp, Artificial Sequence
  chemically synthesized
gcaaagattccttttacacacc

SEQ ID NO: 69069 - DNA, 22 bp, Artificial Sequence
  chemically synthesized
caaagattccttttacacacca

SEQ ID NO: 69070 - DNA, 22 bp, Artificial Sequence
  chemically synthesized
cttttacacaccatgttcaaga

SEQ ID NO: 69071 - DNA, 22 bp, Artificial Sequence
  chemically synthesized
ttacacaccatgttcaagaaat

SEQ ID NO: 69072 - DNA, 22 bp, Artificial Sequence
  chemically synthesized
tacacaccatgttcaagaaatc

SEQ ID NO: 69073 - DNA, 22 bp, Artificial Sequence
  chemically synthesized
acacaccatgttcaagaaatca

SEQ ID NO: 69074 - DNA, 22 bp, Artificial Sequence
  chemically synthesized
cacaccatgttcaagaaatcaa

SEQ ID NO: 69075 - DNA, 22 bp, Artificial Sequence
  chemically synthesized
aagaaatcaactggacaagcat

SEQ ID NO: 69076 - DNA, 22 bp, Artificial Sequence
  chemically synthesized
gacaagcatccagtaaacacct

SEQ ID NO: 69077 - DNA, 22 bp, Artificial Sequence
  chemically synthesized
ttgtgtaccaggcaggaggatg

SEQ ID NO: 69078 - DNA, 22 bp, Artificial Sequence
  chemically synthesized
tgtaccaggcaggaggatgaaa

SEQ ID NO: 69079 - DNA, 22 bp, Artificial Sequence
  chemically synthesized
ctggcctcagattgtacatgtg

SEQ ID NO: 69080 - DNA, 22 bp, Artificial Sequence
  chemically synthesized
gcctcagattgtacatgtggca

SEQ ID NO: 69081 - DNA, 22 bp, Artificial Sequence
  chemically synthesized
agattgtacatgtggcatgaca

SEQ ID NO: 69082 - DNA, 22 bp, Artificial Sequence
  chemically synthesized
tacatgtggcatgacatgaggc

SEQ ID NO: 69083 - DNA, 22 bp, Artificial Sequence
  chemically synthesized
gctctttctggaagggctgtcg

SEQ ID NO: 69084 - DNA, 22 bp, Artificial Sequence
  chemically synthesized
ctctttctggaagggctgtcga

SEQ ID NO: 69085 - DNA, 22 bp, Artificial Sequence
  chemically synthesized
tttctggaagggctgtcgatac

SEQ ID NO: 69086 - DNA, 22 bp, Artificial Sequence
  chemically synthesized
tctggaagggctgtcgatactg

SEQ ID NO: 69087 - DNA, 22 bp, Artificial Sequence
  chemically synthesized
ctggaagggctgtcgatactgg

SEQ ID NO: 69088 - DNA, 22 bp, Artificial Sequence
  chemically synthesized
tggaagggctgtcgatactggg

SEQ ID NO: 69089 - DNA, 22 bp, Artificial Sequence
  chemically synthesized
gaagggctgtcgatactgggaa

SEQ ID NO: 69090 - DNA, 22 bp, Artificial Sequence
  chemically synthesized
tcgatactgggaagaaacaaag

SEQ ID NO: 69091 - DNA, 22 bp, Artificial Sequence
  chemically synthesized
ggaagaaacaaaggcgaattta

SEQ ID NO: 69092 - DNA, 22 bp, Artificial Sequence
  chemically synthesized
atgatcctcccttgcagatgca

SEQ ID NO: 69093 - DNA, 22 bp, Artificial Sequence
  chemically synthesized
tgatcctcccttgcagatgcac

SEQ ID NO: 69094 - DNA, 22 bp, Artificial Sequence
  chemically synthesized
ccttgcagatgcacagcagatt

SEQ ID NO: 69095 - DNA, 22 bp, Artificial Sequence
  chemically synthesized
gcagatgcacagcagattccga

SEQ ID NO: 69096 - DNA, 22 bp, Artificial Sequence
  chemically synthesized
cagatgcacagcagattccgag

SEQ ID NO: 69097 - DNA, 22 bp, Artificial Sequence
  chemically synthesized
cgagtgaaatggcctgctctga

SEQ ID NO: 69098 - DNA, 22 bp, Artificial Sequence
  chemically synthesized
ctctgaatctaggtgctggagt

SEQ ID NO: 69099 - DNA, 22 bp, Artificial Sequence
  chemically synthesized
tgaatctaggtgctggagtcca

SEQ ID NO: 69100 - DNA, 22 bp, Artificial Sequence
  chemically synthesized
aatctaggtgctggagtccaaa

SEQ ID NO: 69101 - DNA, 22 bp, Artificial Sequence
  chemically synthesized
ggtgctggagtccaaagttgat

SEQ ID NO: 69102 - DNA, 22 bp, Artificial Sequence
  chemically synthesized
gagtccaaagttgatgctcttt

SEQ ID NO: 69103 - DNA, 22 bp, Artificial Sequence
  chemically synthesized
atgctctttccactttgtttgc

SEQ ID NO: 69104 - DNA, 22 bp, Artificial Sequence
  chemically synthesized
tttccactttgtttgcaaagac

SEQ ID NO: 69105 - DNA, 22 bp, Artificial Sequence
  chemically synthesized
tccactttgtttgcaaagacct

SEQ ID NO: 69106 - DNA, 22 bp, Artificial Sequence
  chemically synthesized
ccactttgtttgcaaagacctc

SEQ ID NO: 69107 - DNA, 22 bp, Artificial Sequence
  chemically synthesized
cactttgtttgcaaagacctca

SEQ ID NO: 69108 - DNA, 22 bp, Artificial Sequence
  chemically synthesized
tgtttgcaaagacctcactcca

SEQ ID NO: 69109 - DNA, 22 bp, Artificial Sequence
  chemically synthesized
gtttgcaaagacctcactccag

SEQ ID NO: 69110 - DNA, 22 bp, Artificial Sequence
  chemically synthesized
tttgcaaagacctcactccaga

SEQ ID NO: 69111 - DNA, 22 bp, Artificial Sequence
  chemically synthesized
gcaaagacctcactccagagag

SEQ ID NO: 69112 - DNA, 22 bp, Artificial Sequence
  chemically synthesized
caaagacctcactccagagagc

SEQ ID NO: 69113 - DNA, 22 bp, Artificial Sequence
  chemically synthesized
actccagagagccagtgcacaa

SEQ ID NO: 69114 - DNA, 22 bp, Artificial Sequence
  chemically synthesized
cagagagccagtgcacaaagac

SEQ ID NO: 69115 - DNA, 22 bp, Artificial Sequence
  chemically synthesized
acagtgactccatgaggtaagg

SEQ ID NO: 69116 - DNA, 22 bp, Artificial Sequence
  chemically synthesized
catgaggtaaggtcagagttat

SEQ ID NO: 69117 - DNA, 22 bp, Artificial Sequence
  chemically synthesized
tccccatcgagcccgccatcgc

SEQ ID NO: 69118 - DNA, 22 bp, Artificial Sequence
  chemically synthesized
atggtttgctgacagaggtggc

SEQ ID NO: 69119 - DNA, 22 bp, Artificial Sequence
  chemically synthesized
gctgacagaggtggcagaggtg

SEQ ID NO: 69120 - DNA, 22 bp, Artificial Sequence
  chemically synthesized
ctgacagaggtggcagaggtgg

SEQ ID NO: 69121 - DNA, 22 bp, Artificial Sequence
  chemically synthesized
acagaggtggcagaggtggttc

SEQ ID NO: 69122 - DNA, 22 bp, Artificial Sequence
  chemically synthesized
tccttcctgttgcctgtaattg

SEQ ID NO: 69123 - DNA, 22 bp, Artificial Sequence
  chemically synthesized
cttcctgttgcctgtaattgga

SEQ ID NO: 69124 - DNA, 22 bp, Artificial Sequence
  chemically synthesized
cctgttgcctgtaattggaatt

SEQ ID NO: 69125 - DNA, 22 bp, Artificial Sequence
  chemically synthesized
ctgttgcctgtaattggaattg

SEQ ID NO: 69126 - DNA, 22 bp, Artificial Sequence
  chemically synthesized
ttgcctgtaattggaattgtat

SEQ ID NO: 69127 - DNA, 22 bp, Artificial Sequence
  chemically synthesized
cctgtaattggaattgtatttg

SEQ ID NO: 69128 - DNA, 22 bp, Artificial Sequence
  chemically synthesized
taattggaattgtatttgcaat

SEQ ID NO: 69129 - DNA, 22 bp, Artificial Sequence
  chemically synthesized
gaattgtatttgcaatgtgctt

SEQ ID NO: 69130 - DNA, 22 bp, Artificial Sequence
  chemically synthesized
tatttgcaatgtgcttttggca

SEQ ID NO: 69131 - DNA, 22 bp, Artificial Sequence
  chemically synthesized
gcaatgtgcttttggcagcttc

SEQ ID NO: 69132 - DNA, 22 bp, Artificial Sequence
  chemically synthesized
caatgtgcttttggcagcttcc

SEQ ID NO: 69133 - DNA, 22 bp, Artificial Sequence
  chemically synthesized
ttggcagcttcctcatcaaagg

SEQ ID NO: 69134 - DNA, 22 bp, Artificial Sequence
  chemically synthesized
tggcagcttcctcatcaaaggc

SEQ ID NO: 69135 - DNA, 22 bp, Artificial Sequence
  chemically synthesized
ggcagcttcctcatcaaaggcc

SEQ ID NO: 69136 - DNA, 22 bp, Artificial Sequence
  chemically synthesized
gcagcttcctcatcaaaggcct

SEQ ID NO: 69137 - DNA, 22 bp, Artificial Sequence
  chemically synthesized
cctcatcaaaggcctcccctgg

SEQ ID NO: 69138 - DNA, 22 bp, Artificial Sequence
  chemically synthesized
ctcatcaaaggcctcccctgga

SEQ ID NO: 69139 - DNA, 22 bp, Artificial Sequence
  chemically synthesized
atcaaaggcctcccctggagca

SEQ ID NO: 69140 - DNA, 22 bp, Artificial Sequence
  chemically synthesized
ccctggagcaagaatagatggg

SEQ ID NO: 69141 - DNA, 22 bp, Artificial Sequence
  chemically synthesized
gagcaagaatagatgggagcta

SEQ ID NO: 69142 - DNA, 22 bp, Artificial Sequence
  chemically synthesized
actttccctgctgctccccttt

SEQ ID NO: 69143 - DNA, 22 bp, Artificial Sequence
  chemically synthesized
tccctgctgctcccctttggga

SEQ ID NO: 69144 - DNA, 22 bp, Artificial Sequence
  chemically synthesized
ccctgctgctcccctttgggac

SEQ ID NO: 69145 - DNA, 22 bp, Artificial Sequence
  chemically synthesized
cctgctgctcccctttgggacc

SEQ ID NO: 69146 - DNA, 22 bp, Artificial Sequence
  chemically synthesized
ctgctcccctttgggaccttgg

SEQ ID NO: 69147 - DNA, 22 bp, Artificial Sequence
  chemically synthesized
ctcccctttgggaccttggcct

SEQ ID NO: 69148 - DNA, 22 bp, Artificial Sequence
  chemically synthesized
ccctttgggaccttggcctctc

SEQ ID NO: 69149 - DNA, 22 bp, Artificial Sequence
  chemically synthesized
tgggaccttggcctctcaccta

SEQ ID NO: 69150 - DNA, 22 bp, Artificial Sequence
  chemically synthesized
gggaccttggcctctcacctac

SEQ ID NO: 69151 - DNA, 22 bp, Artificial Sequence
  chemically synthesized
ggaccttggcctctcacctacc

SEQ ID NO: 69152 - DNA, 22 bp, Artificial Sequence
  chemically synthesized
ggcctctcacctaccggggtcg

SEQ ID NO: 69153 - DNA, 22 bp, Artificial Sequence
  chemically synthesized
gcctctcacctaccggggtcgt

SEQ ID NO: 69154 - DNA, 20 bp, Artificial Sequence
  chemically synthesized
gtaaggctgaggcctggcac

SEQ ID NO: 69155 - DNA, 20 bp, Artificial Sequence
  chemically synthesized
gcctggcacaggtctgttcc

SEQ ID NO: 69156 - DNA, 20 bp, Artificial Sequence
  chemically synthesized
ggtctgttcctggtcatatc

SEQ ID NO: 69157 - DNA, 20 bp, Artificial Sequence
  chemically synthesized
tctgttcctggtcatatctg

SEQ ID NO: 69158 - DNA, 20 bp, Artificial Sequence
  chemically synthesized
ctgttcctggtcatatctgg

SEQ ID NO: 69159 - DNA, 20 bp, Artificial Sequence
  chemically synthesized
tgttcctggtcatatctgga

SEQ ID NO: 69160 - DNA, 20 bp, Artificial Sequence
  chemically synthesized
gttcctggtcatatctggag

SEQ ID NO: 69161 - DNA, 20 bp, Artificial Sequence
  chemically synthesized
ctggtcatatctggagggga

SEQ ID NO: 69162 - DNA, 20 bp, Artificial Sequence
  chemically synthesized
ggtcatatctggaggggatg

SEQ ID NO: 69163 - DNA, 20 bp, Artificial Sequence
  chemically synthesized
ctggaggggatggagaatgt

SEQ ID NO: 69164 - DNA, 20 bp, Artificial Sequence
  chemically synthesized
aggggatggagaatgtgagc

SEQ ID NO: 69165 - DNA, 20 bp, Artificial Sequence
  chemically synthesized
cgttcctccccacccctctc

SEQ ID NO: 69166 - DNA, 20 bp, Artificial Sequence
  chemically synthesized
gaccttaacctcctcatcta

SEQ ID NO: 69167 - DNA, 20 bp, Artificial Sequence
  chemically synthesized
cttaacctcctcatctatag

SEQ ID NO: 69168 - DNA, 20 bp, Artificial Sequence
  chemically synthesized
ttaacctcctcatctataga

SEQ ID NO: 69169 - DNA, 20 bp, Artificial Sequence
  chemically synthesized
taacctcctcatctatagaa

SEQ ID NO: 69170 - DNA, 20 bp, Artificial Sequence
  chemically synthesized
aacctcctcatctatagaag

SEQ ID NO: 69171 - DNA, 20 bp, Artificial Sequence
  chemically synthesized
cctcctcatctatagaaggg

SEQ ID NO: 69172 - DNA, 20 bp, Artificial Sequence
  chemically synthesized
ctcatctatagaaggggaga

SEQ ID NO: 69173 - DNA, 20 bp, Artificial Sequence
  chemically synthesized
ggggagaaagatgcatgccc

SEQ ID NO: 69174 - DNA, 20 bp, Artificial Sequence
  chemically synthesized
gagaaagatgcatgcccaag

SEQ ID NO: 69175 - DNA, 20 bp, Artificial Sequence
  chemically synthesized
aaagatgcatgcccaagcag

SEQ ID NO: 69176 - DNA, 20 bp, Artificial Sequence
  chemically synthesized
aagatgcatgcccaagcagt

SEQ ID NO: 69177 - DNA, 20 bp, Artificial Sequence
  chemically synthesized
gatgcatgcccaagcagtag

SEQ ID NO: 69178 - DNA, 20 bp, Artificial Sequence
  chemically synthesized
tgcatgcccaagcagtagga

SEQ ID NO: 69179 - DNA, 20 bp, Artificial Sequence
  chemically synthesized
gcatgcccaagcagtaggag

SEQ ID NO: 69180 - DNA, 20 bp, Artificial Sequence
  chemically synthesized
tgcccaagcagtaggagagg

SEQ ID NO: 69181 - DNA, 20 bp, Artificial Sequence
  chemically synthesized
caagcagtaggagaggtggt

SEQ ID NO: 69182 - DNA, 20 bp, Artificial Sequence
  chemically synthesized
aagcagtaggagaggtggtg

SEQ ID NO: 69183 - DNA, 20 bp, Artificial Sequence
  chemically synthesized
aggagaggtggtgaggctta

SEQ ID NO: 69184 - DNA, 20 bp, Artificial Sequence
  chemically synthesized
ggagaggtggtgaggcttat

SEQ ID NO: 69185 - DNA, 20 bp, Artificial Sequence
  chemically synthesized
agaggtggtgaggcttatag

SEQ ID NO: 69186 - DNA, 20 bp, Artificial Sequence
  chemically synthesized
gtgaggcttataggagacaa

SEQ ID NO: 69187 - DNA, 20 bp, Artificial Sequence
  chemically synthesized
ggcttataggagacaacaga

SEQ ID NO: 69188 - DNA, 20 bp, Artificial Sequence
  chemically synthesized
gcttataggagacaacagac

SEQ ID NO: 69189 - DNA, 20 bp, Artificial Sequence
  chemically synthesized
ttataggagacaacagacag

SEQ ID NO: 69190 - DNA, 20 bp, Artificial Sequence
  chemically synthesized
caacagacaggagcccccga

SEQ ID NO: 69191 - DNA, 20 bp, Artificial Sequence
  chemically synthesized
agacaggagcccccgacaga

SEQ ID NO: 69192 - DNA, 20 bp, Artificial Sequence
  chemically synthesized
acaggagcccccgacagaca

SEQ ID NO: 69193 - DNA, 20 bp, Artificial Sequence
  chemically synthesized
caggagcccccgacagacag

SEQ ID NO: 69194 - DNA, 20 bp, Artificial Sequence
  chemically synthesized
ggagcccccgacagacagag

SEQ ID NO: 69195 - DNA, 20 bp, Artificial Sequence
  chemically synthesized
agacagaggagctgtgcaaa

SEQ ID NO: 69196 - DNA, 20 bp, Artificial Sequence
  chemically synthesized
agaggagctgtgcaaacaga

SEQ ID NO: 69197 - DNA, 20 bp, Artificial Sequence
  chemically synthesized
gctgtgcaaacagaaagaaa

SEQ ID NO: 69198 - DNA, 20 bp, Artificial Sequence
  chemically synthesized
ttgttgctgttgctgtatct

SEQ ID NO: 69199 - DNA, 20 bp, Artificial Sequence
  chemically synthesized
tgctgttgctgtatcttggc

SEQ ID NO: 69200 - DNA, 20 bp, Artificial Sequence
  chemically synthesized
ttggctggtgtcccccatcc

SEQ ID NO: 69201 - DNA, 20 bp, Artificial Sequence
  chemically synthesized
tggctggtgtcccccatcct

SEQ ID NO: 69202 - DNA, 20 bp, Artificial Sequence
  chemically synthesized
ggctggtgtcccccatcctg

SEQ ID NO: 69203 - DNA, 20 bp, Artificial Sequence
  chemically synthesized
tgtcccccatcctggggtgc

SEQ ID NO: 69204 - DNA, 20 bp, Artificial Sequence
  chemically synthesized
gtcccccatcctggggtgcc

SEQ ID NO: 69205 - DNA, 20 bp, Artificial Sequence
  chemically synthesized
atcctggggtgccaggactg

SEQ ID NO: 69206 - DNA, 20 bp, Artificial Sequence
  chemically synthesized
gggtgccaggactgcagacc

SEQ ID NO: 69207 - DNA, 20 bp, Artificial Sequence
  chemically synthesized
ccctcatccacttctgctta

SEQ ID NO: 69208 - DNA, 20 bp, Artificial Sequence
  chemically synthesized
cctcatccacttctgcttac

SEQ ID NO: 69209 - DNA, 20 bp, Artificial Sequence
  chemically synthesized
ccacttctgcttacaggaac

SEQ ID NO: 69210 - DNA, 20 bp, Artificial Sequence
  chemically synthesized
acaggaaccagtgtatccac

SEQ ID NO: 69211 - DNA, 20 bp, Artificial Sequence
  chemically synthesized
caggaaccagtgtatccacc

SEQ ID NO: 69212 - DNA, 20 bp, Artificial Sequence
  chemically synthesized
ggaaccagtgtatccaccag

SEQ ID NO: 69213 - DNA, 20 bp, Artificial Sequence
  chemically synthesized
gaaccagtgtatccaccagg

SEQ ID NO: 69214 - DNA, 20 bp, Artificial Sequence
  chemically synthesized
tgtatccaccaggaggtacc

SEQ ID NO: 69215 - DNA, 20 bp, Artificial Sequence
  chemically synthesized
gtatccaccaggaggtaccg

SEQ ID NO: 69216 - DNA, 20 bp, Artificial Sequence
  chemically synthesized
tatccaccaggaggtaccga

SEQ ID NO: 69217 - DNA, 20 bp, Artificial Sequence
  chemically synthesized
atccaccaggaggtaccgag

SEQ ID NO: 69218 - DNA, 20 bp, Artificial Sequence
  chemically synthesized
tccaccaggaggtaccgagg

SEQ ID NO: 69219 - DNA, 20 bp, Artificial Sequence
  chemically synthesized
ccaccaggaggtaccgaggg

SEQ ID NO: 69220 - DNA, 20 bp, Artificial Sequence
  chemically synthesized
aggaggtaccgaggggggac

SEQ ID NO: 69221 - DNA, 20 bp, Artificial Sequence
  chemically synthesized
ggaggtaccgaggggggacc

SEQ ID NO: 69222 - DNA, 20 bp, Artificial Sequence
  chemically synthesized
ggtaccgaggggggaccggg

SEQ ID NO: 69223 - DNA, 20 bp, Artificial Sequence
  chemically synthesized
gtaccgaggggggaccgggc

SEQ ID NO: 69224 - DNA, 20 bp, Artificial Sequence
  chemically synthesized
gaggggggaccgggcaggac

SEQ ID NO: 69225 - DNA, 20 bp, Artificial Sequence
  chemically synthesized
aggggggaccgggcaggact

SEQ ID NO: 69226 - DNA, 20 bp, Artificial Sequence
  chemically synthesized
gaccgggcaggactgggaaa

SEQ ID NO: 69227 - DNA, 20 bp, Artificial Sequence
  chemically synthesized
accgggcaggactgggaaac

SEQ ID NO: 69228 - DNA, 20 bp, Artificial Sequence
  chemically synthesized
gaaacaggacacaaccctca

SEQ ID NO: 69229 - DNA, 20 bp, Artificial Sequence
  chemically synthesized
ggctgctgttattatgaaaa

SEQ ID NO: 69230 - DNA, 20 bp, Artificial Sequence
  chemically synthesized
gctgctgttattatgaaaat

SEQ ID NO: 69231 - DNA, 20 bp, Artificial Sequence
  chemically synthesized
tgctgttattatgaaaatag

SEQ ID NO: 69232 - DNA, 20 bp, Artificial Sequence
  chemically synthesized
ttattatgaaaataggagct

SEQ ID NO: 69233 - DNA, 20 bp, Artificial Sequence
  chemically synthesized
tgaaaataggagctcagctg

SEQ ID NO: 69234 - DNA, 20 bp, Artificial Sequence
  chemically synthesized
tctccatctgccctgcacct

SEQ ID NO: 69235 - DNA, 20 bp, Artificial Sequence
  chemically synthesized
ccatctgccctgcacctcag

SEQ ID NO: 69236 - DNA, 20 bp, Artificial Sequence
  chemically synthesized
catctgccctgcacctcagc

SEQ ID NO: 69237 - DNA, 20 bp, Artificial Sequence
  chemically synthesized
ctgccctgcacctcagcagg

SEQ ID NO: 69238 - DNA, 20 bp, Artificial Sequence
  chemically synthesized
ccacaacccccctcctgccc

SEQ ID NO: 69239 - DNA, 20 bp, Artificial Sequence
  chemically synthesized
ccccagacctgctgcctgcc

SEQ ID NO: 69240 - DNA, 20 bp, Artificial Sequence
  chemically synthesized
cccagacctgctgcctgcct

SEQ ID NO: 69241 - DNA, 20 bp, Artificial Sequence
  chemically synthesized
cctgctgcctgcctgggcca

SEQ ID NO: 69242 - DNA, 20 bp, Artificial Sequence
  chemically synthesized
ctgctgcctgcctgggccat

SEQ ID NO: 69243 - DNA, 20 bp, Artificial Sequence
  chemically synthesized
tgctgcctgcctgggccatg

SEQ ID NO: 69244 - DNA, 20 bp, Artificial Sequence
  chemically synthesized
ctgcctgcctgggccatggg

SEQ ID NO: 69245 - DNA, 20 bp, Artificial Sequence
  chemically synthesized
tgcctgggccatggggagct

SEQ ID NO: 69246 - DNA, 20 bp, Artificial Sequence
  chemically synthesized
ctgggccatggggagctcag

SEQ ID NO: 69247 - DNA, 20 bp, Artificial Sequence
  chemically synthesized
ggggagctcagaagcctctc

SEQ ID NO: 69248 - DNA, 20 bp, Artificial Sequence
  chemically synthesized
agcctctccagaacctctcg

SEQ ID NO: 69249 - DNA, 20 bp, Artificial Sequence
  chemically synthesized
tccagaacctctcgcagtga

SEQ ID NO: 69250 - DNA, 20 bp, Artificial Sequence
  chemically synthesized
ccagaacctctcgcagtgaa

SEQ ID NO: 69251 - DNA, 20 bp, Artificial Sequence
  chemically synthesized
atacttacgattcactgtcc

SEQ ID NO: 69252 - DNA, 20 bp, Artificial Sequence
  chemically synthesized
tacttacgattcactgtccc

SEQ ID NO: 69253 - DNA, 20 bp, Artificial Sequence
  chemically synthesized
tacgattcactgtcccaggt

SEQ ID NO: 69254 - DNA, 20 bp, Artificial Sequence
  chemically synthesized
gattcactgtcccaggtcag

SEQ ID NO: 69255 - DNA, 20 bp, Artificial Sequence
  chemically synthesized
tcactgtcccaggtcagtgg

SEQ ID NO: 69256 - DNA, 20 bp, Artificial Sequence
  chemically synthesized
caggtcagtggtggtgcctg

SEQ ID NO: 69257 - DNA, 20 bp, Artificial Sequence
  chemically synthesized
cagtggtggtgcctgaagct

SEQ ID NO: 69258 - DNA, 20 bp, Artificial Sequence
  chemically synthesized
agtggtggtgcctgaagctg

SEQ ID NO: 69259 - DNA, 20 bp, Artificial Sequence
  chemically synthesized
tggtggtgcctgaagctgag

SEQ ID NO: 69260 - DNA, 20 bp, Artificial Sequence
  chemically synthesized
ggtgcctgaagctgaggaga

SEQ ID NO: 69261 - DNA, 20 bp, Artificial Sequence
  chemically synthesized
gtgcctgaagctgaggagac

SEQ ID NO: 69262 - DNA, 20 bp, Artificial Sequence
  chemically synthesized
tgcctgaagctgaggagaca

SEQ ID NO: 69263 - DNA, 20 bp, Artificial Sequence
  chemically synthesized
ccctgtcctcgtccgtattt

SEQ ID NO: 69264 - DNA, 20 bp, Artificial Sequence
  chemically synthesized
tgtcctcgtccgtatttaag

SEQ ID NO: 69265 - DNA, 20 bp, Artificial Sequence
  chemically synthesized
cctcgtccgtatttaagcag

SEQ ID NO: 69266 - DNA, 20 bp, Artificial Sequence
  chemically synthesized
ccgtatttaagcagtggatc

SEQ ID NO: 69267 - DNA, 20 bp, Artificial Sequence
  chemically synthesized
gtatttaagcagtggatcca

SEQ ID NO: 69268 - DNA, 20 bp, Artificial Sequence
  chemically synthesized
tatttaagcagtggatccag

SEQ ID NO: 69269 - DNA, 20 bp, Artificial Sequence
  chemically synthesized
atttaagcagtggatccaga

SEQ ID NO: 69270 - DNA, 20 bp, Artificial Sequence
  chemically synthesized
tttaagcagtggatccagag

SEQ ID NO: 69271 - DNA, 20 bp, Artificial Sequence
  chemically synthesized
cagtggatccagaggggcaa

SEQ ID NO: 69272 - DNA, 20 bp, Artificial Sequence
  chemically synthesized
agtggatccagaggggcaac

SEQ ID NO: 69273 - DNA, 20 bp, Artificial Sequence
  chemically synthesized
gtggatccagaggggcaacg

SEQ ID NO: 69274 - DNA, 20 bp, Artificial Sequence
  chemically synthesized
tggatccagaggggcaacgg

SEQ ID NO: 69275 - DNA, 20 bp, Artificial Sequence
  chemically synthesized
gatccagaggggcaacgggg

SEQ ID NO: 69276 - DNA, 20 bp, Artificial Sequence
  chemically synthesized
atccagaggggcaacggggg

SEQ ID NO: 69277 - DNA, 20 bp, Artificial Sequence
  chemically synthesized
ggggcaacgggggaggctgc

SEQ ID NO: 69278 - DNA, 20 bp, Artificial Sequence
  chemically synthesized
gctgctggtgaatattaacc

SEQ ID NO: 69279 - DNA, 20 bp, Artificial Sequence
  chemically synthesized
ctgctggtgaatattaacca

SEQ ID NO: 69280 - DNA, 20 bp, Artificial Sequence
  chemically synthesized
aatattaaccaaggtcaccc

SEQ ID NO: 69281 - DNA, 20 bp, Artificial Sequence
  chemically synthesized
accaaggtcaccccagttat

SEQ ID NO: 69282 - DNA, 20 bp, Artificial Sequence
  chemically synthesized
caaggtcaccccagttatcg

SEQ ID NO: 69283 - DNA, 20 bp, Artificial Sequence
  chemically synthesized
aaggtcaccccagttatcgg

SEQ ID NO: 69284 - DNA, 20 bp, Artificial Sequence
  chemically synthesized
ggtcaccccagttatcggag

SEQ ID NO: 69285 - DNA, 20 bp, Artificial Sequence
  chemically synthesized
ccagttatcggaggagcaaa

SEQ ID NO: 69286 - DNA, 20 bp, Artificial Sequence
  chemically synthesized
cagttatcggaggagcaaac

SEQ ID NO: 69287 - DNA, 20 bp, Artificial Sequence
  chemically synthesized
agttatcggaggagcaaaca

SEQ ID NO: 69288 - DNA, 20 bp, Artificial Sequence
  chemically synthesized
gttatcggaggagcaaacag

SEQ ID NO: 69289 - DNA, 20 bp, Artificial Sequence
  chemically synthesized
cggaggagcaaacaggggct

SEQ ID NO: 69290 - DNA, 20 bp, Artificial Sequence
  chemically synthesized
caaacaggggctaagtccac

SEQ ID NO: 69291 - DNA, 20 bp, Artificial Sequence
  chemically synthesized
caggggctaagtccactggc

SEQ ID NO: 69292 - DNA, 20 bp, Artificial Sequence
  chemically synthesized
aggggctaagtccactggct

SEQ ID NO: 69293 - DNA, 20 bp, Artificial Sequence
  chemically synthesized
aagtccactggctgggatct

SEQ ID NO: 69294 - DNA, 20 bp, Artificial Sequence
  chemically synthesized
agtcgcccgcctacgctgcc

SEQ ID NO: 69295 - DNA, 20 bp, Artificial Sequence
  chemically synthesized
cgctgcccggacgctttgcc

SEQ ID NO: 69296 - DNA, 20 bp, Artificial Sequence
  chemically synthesized
gctgcccggacgctttgcct

SEQ ID NO: 69297 - DNA, 20 bp, Artificial Sequence
  chemically synthesized
gcccggacgctttgcctggg

SEQ ID NO: 69298 - DNA, 20 bp, Artificial Sequence
  chemically synthesized
cgctttgcctgggcagtgta

SEQ ID NO: 69299 - DNA, 20 bp, Artificial Sequence
  chemically synthesized
gcttccactgcacttaccga

SEQ ID NO: 69300 - DNA, 20 bp, Artificial Sequence
  chemically synthesized
cttccactgcacttaccgaa

SEQ ID NO: 69301 - DNA, 20 bp, Artificial Sequence
  chemically synthesized
tccactgcacttaccgaaag

SEQ ID NO: 69302 - DNA, 20 bp, Artificial Sequence
  chemically synthesized
ccgaaaggagtcattgtacc

SEQ ID NO: 69303 - DNA, 20 bp, Artificial Sequence
  chemically synthesized
aggagtcattgtacctggct

SEQ ID NO: 69304 - DNA, 20 bp, Artificial Sequence
  chemically synthesized
tgtacctggctcagaaacca

SEQ ID NO: 69305 - DNA, 20 bp, Artificial Sequence
  chemically synthesized
aaccacagcgtcctgtgtcc

SEQ ID NO: 69306 - DNA, 20 bp, Artificial Sequence
  chemically synthesized
accacagcgtcctgtgtcca

SEQ ID NO: 69307 - DNA, 20 bp, Artificial Sequence
  chemically synthesized
acagcgtcctgtgtccaagg

SEQ ID NO: 69308 - DNA, 20 bp, Artificial Sequence
  chemically synthesized
agcgtcctgtgtccaaggtg

SEQ ID NO: 69309 - DNA, 20 bp, Artificial Sequence
  chemically synthesized
gcgtcctgtgtccaaggtgg

SEQ ID NO: 69310 - DNA, 20 bp, Artificial Sequence
  chemically synthesized
cgtcctgtgtccaaggtgga

SEQ ID NO: 69311 - DNA, 20 bp, Artificial Sequence
  chemically synthesized
gtcctgtgtccaaggtggag

SEQ ID NO: 69312 - DNA, 20 bp, Artificial Sequence
  chemically synthesized
tcctgtgtccaaggtggagg

SEQ ID NO: 69313 - DNA, 20 bp, Artificial Sequence
  chemically synthesized
tgtgtccaaggtggaggggg

SEQ ID NO: 69314 - DNA, 20 bp, Artificial Sequence
  chemically synthesized
caaggtggagggggtggcgt

SEQ ID NO: 69315 - DNA, 20 bp, Artificial Sequence
  chemically synthesized
gtggagggggtggcgtgagt

SEQ ID NO: 69316 - DNA, 20 bp, Artificial Sequence
  chemically synthesized
agggggtggcgtgagtcaga

SEQ ID NO: 69317 - DNA, 20 bp, Artificial Sequence
  chemically synthesized
ggcgtgagtcagacagtctc

SEQ ID NO: 69318 - DNA, 20 bp, Artificial Sequence
  chemically synthesized
gcgtgagtcagacagtctct

SEQ ID NO: 69319 - DNA, 20 bp, Artificial Sequence
  chemically synthesized
gtgagtcagacagtctctgg

SEQ ID NO: 69320 - DNA, 20 bp, Artificial Sequence
  chemically synthesized
gagtcagacagtctctggga

SEQ ID NO: 69321 - DNA, 20 bp, Artificial Sequence
  chemically synthesized
gtctctgggagagtaccact

SEQ ID NO: 69322 - DNA, 20 bp, Artificial Sequence
  chemically synthesized
ctgggagagtaccacttagc

SEQ ID NO: 69323 - DNA, 20 bp, Artificial Sequence
  chemically synthesized
ctggccctctgctctcactg

SEQ ID NO: 69324 - DNA, 20 bp, Artificial Sequence
  chemically synthesized
tgctctcactgcagaatcct

SEQ ID NO: 69325 - DNA, 20 bp, Artificial Sequence
  chemically synthesized
tctcactgcagaatccttag

SEQ ID NO: 69326 - DNA, 20 bp, Artificial Sequence
  chemically synthesized
atccttagtggctgttccac

SEQ ID NO: 69327 - DNA, 20 bp, Artificial Sequence
  chemically synthesized
cttagtggctgttccactgg

SEQ ID NO: 69328 - DNA, 20 bp, Artificial Sequence
  chemically synthesized
gtggctgttccactggtagc

SEQ ID NO: 69329 - DNA, 20 bp, Artificial Sequence
  chemically synthesized
agcaagatctaccatttact

SEQ ID NO: 69330 - DNA, 20 bp, Artificial Sequence
  chemically synthesized
ccccaaaatgcctgatgctg

SEQ ID NO: 69331 - DNA, 20 bp, Artificial Sequence
  chemically synthesized
ctgaagacttactgccgccc

SEQ ID NO: 69332 - DNA, 20 bp, Artificial Sequence
  chemically synthesized
tgaagacttactgccgccct

SEQ ID NO: 69333 - DNA, 20 bp, Artificial Sequence
  chemically synthesized
aagacttactgccgccctgg

SEQ ID NO: 69334 - DNA, 20 bp, Artificial Sequence
  chemically synthesized
ttactgccgccctgggagat

SEQ ID NO: 69335 - DNA, 20 bp, Artificial Sequence
  chemically synthesized
actgccgccctgggagatca

SEQ ID NO: 69336 - DNA, 20 bp, Artificial Sequence
  chemically synthesized
gccgccctgggagatcagag

SEQ ID NO: 69337 - DNA, 20 bp, Artificial Sequence
  chemically synthesized
ccgccctgggagatcagagt

SEQ ID NO: 69338 - DNA, 20 bp, Artificial Sequence
  chemically synthesized
cctgggagatcagagtgggt

SEQ ID NO: 69339 - DNA, 20 bp, Artificial Sequence
  chemically synthesized
tgggagatcagagtgggtta

SEQ ID NO: 69340 - DNA, 20 bp, Artificial Sequence
  chemically synthesized
gtgggttagagcccatttga

SEQ ID NO: 69341 - DNA, 20 bp, Artificial Sequence
  chemically synthesized
ttagagcccatttgacagat

SEQ ID NO: 69342 - DNA, 20 bp, Artificial Sequence
  chemically synthesized
tagagcccatttgacagatg

SEQ ID NO: 69343 - DNA, 20 bp, Artificial Sequence
  chemically synthesized
ccatttgacagatgaggaaa

SEQ ID NO: 69344 - DNA, 20 bp, Artificial Sequence
  chemically synthesized
catttgacagatgaggaaac

SEQ ID NO: 69345 - DNA, 20 bp, Artificial Sequence
  chemically synthesized
gacagatgaggaaacaggct

SEQ ID NO: 69346 - DNA, 20 bp, Artificial Sequence
  chemically synthesized
cagatgaggaaacaggctca

SEQ ID NO: 69347 - DNA, 20 bp, Artificial Sequence
  chemically synthesized
atgaggaaacaggctcagag

SEQ ID NO: 69348 - DNA, 20 bp, Artificial Sequence
  chemically synthesized
gaggaaacaggctcagagcg

SEQ ID NO: 69349 - DNA, 20 bp, Artificial Sequence
  chemically synthesized
ggaaacaggctcagagcgga

SEQ ID NO: 69350 - DNA, 20 bp, Artificial Sequence
  chemically synthesized
gcggagagaccgctcatcca

SEQ ID NO: 69351 - DNA, 20 bp, Artificial Sequence
  chemically synthesized
accgctcatccaaagttacc

SEQ ID NO: 69352 - DNA, 20 bp, Artificial Sequence
  chemically synthesized
ctcatccaaagttacccagt

SEQ ID NO: 69353 - DNA, 20 bp, Artificial Sequence
  chemically synthesized
caaagttacccagtcagcct

SEQ ID NO: 69354 - DNA, 20 bp, Artificial Sequence
  chemically synthesized
agacacaaacaccctcttga

SEQ ID NO: 69355 - DNA, 20 bp, Artificial Sequence
  chemically synthesized
caccctcttgatggtcccga

SEQ ID NO: 69356 - DNA, 20 bp, Artificial Sequence
  chemically synthesized
tgatggtcccgatggaaaaa

SEQ ID NO: 69357 - DNA, 20 bp, Artificial Sequence
  chemically synthesized
atggtcccgatggaaaaatg

SEQ ID NO: 69358 - DNA, 20 bp, Artificial Sequence
  chemically synthesized
tggaaaaatggagcatgact

SEQ ID NO: 69359 - DNA, 20 bp, Artificial Sequence
  chemically synthesized
ggaaaaatggagcatgactg

SEQ ID NO: 69360 - DNA, 20 bp, Artificial Sequence
  chemically synthesized
aaaatggagcatgactgagg

SEQ ID NO: 69361 - DNA, 20 bp, Artificial Sequence
  chemically synthesized
actgaggcagacacaaccgt

SEQ ID NO: 69362 - DNA, 20 bp, Artificial Sequence
  chemically synthesized
ctgaggcagacacaaccgtc

SEQ ID NO: 69363 - DNA, 20 bp, Artificial Sequence
  chemically synthesized
ggcagacacaaccgtcaggc

SEQ ID NO: 69364 - DNA, 20 bp, Artificial Sequence
  chemically synthesized
acacaaccgtcaggctggca

SEQ ID NO: 69365 - DNA, 20 bp, Artificial Sequence
  chemically synthesized
cacaaccgtcaggctggcat

SEQ ID NO: 69366 - DNA, 20 bp, Artificial Sequence
  chemically synthesized
acaaccgtcaggctggcatg

SEQ ID NO: 69367 - DNA, 20 bp, Artificial Sequence
  chemically synthesized
caaccgtcaggctggcatgg

SEQ ID NO: 69368 - DNA, 20 bp, Artificial Sequence
  chemically synthesized
aaccgtcaggctggcatggg

SEQ ID NO: 69369 - DNA, 20 bp, Artificial Sequence
  chemically synthesized
aggctggcatggggggccgt

SEQ ID NO: 69370 - DNA, 20 bp, Artificial Sequence
  chemically synthesized
tggcatggggggccgtgaga

SEQ ID NO: 69371 - DNA, 20 bp, Artificial Sequence
  chemically synthesized
ggcatggggggccgtgagac

SEQ ID NO: 69372 - DNA, 20 bp, Artificial Sequence
  chemically synthesized
gcatggggggccgtgagaca

SEQ ID NO: 69373 - DNA, 20 bp, Artificial Sequence
  chemically synthesized
tggggggccgtgagacaggg

SEQ ID NO: 69374 - DNA, 20 bp, Artificial Sequence
  chemically synthesized
gggggccgtgagacagggta

SEQ ID NO: 69375 - DNA, 20 bp, Artificial Sequence
  chemically synthesized
ggggccgtgagacagggtag

SEQ ID NO: 69376 - DNA, 20 bp, Artificial Sequence
  chemically synthesized
gccgtgagacagggtagagg

SEQ ID NO: 69377 - DNA, 20 bp, Artificial Sequence
  chemically synthesized
ccgtgagacagggtagaggt

SEQ ID NO: 69378 - DNA, 20 bp, Artificial Sequence
  chemically synthesized
cgtgagacagggtagaggtg

SEQ ID NO: 69379 - DNA, 20 bp, Artificial Sequence
  chemically synthesized
gagacagggtagaggtgggg

SEQ ID NO: 69380 - DNA, 20 bp, Artificial Sequence
  chemically synthesized
ggtggggaagcacatctgta

SEQ ID NO: 69381 - DNA, 20 bp, Artificial Sequence
  chemically synthesized
ggggaagcacatctgtaaag

SEQ ID NO: 69382 - DNA, 20 bp, Artificial Sequence
  chemically synthesized
ggaagcacatctgtaaagaa

SEQ ID NO: 69383 - DNA, 20 bp, Artificial Sequence
  chemically synthesized
aaagaagagctgtgctgcct

SEQ ID NO: 69384 - DNA, 20 bp, Artificial Sequence
  chemically synthesized
aagaagagctgtgctgcctc

SEQ ID NO: 69385 - DNA, 20 bp, Artificial Sequence
  chemically synthesized
aagagctgtgctgcctcagg

SEQ ID NO: 69386 - DNA, 20 bp, Artificial Sequence
  chemically synthesized
agagctgtgctgcctcaggc

SEQ ID NO: 69387 - DNA, 20 bp, Artificial Sequence
  chemically synthesized
gccgcttcacctctctgaac

SEQ ID NO: 69388 - DNA, 20 bp, Artificial Sequence
  chemically synthesized
ccgcttcacctctctgaacc

SEQ ID NO: 69389 - DNA, 20 bp, Artificial Sequence
  chemically synthesized
actgtttcacctgcatccca

SEQ ID NO: 69390 - DNA, 20 bp, Artificial Sequence
  chemically synthesized
tgtttcacctgcatcccaaa

SEQ ID NO: 69391 - DNA, 20 bp, Artificial Sequence
  chemically synthesized
tcacctgcatcccaaagagt

SEQ ID NO: 69392 - DNA, 20 bp, Artificial Sequence
  chemically synthesized
cctgcatcccaaagagttgg

SEQ ID NO: 69393 - DNA, 20 bp, Artificial Sequence
  chemically synthesized
gagttggaagtttcattccc

SEQ ID NO: 69394 - DNA, 20 bp, Artificial Sequence
  chemically synthesized
cattcccaagcatgcttgtg

SEQ ID NO: 69395 - DNA, 20 bp, Artificial Sequence
  chemically synthesized
agcatgcttgtgaagtgcct

SEQ ID NO: 69396 - DNA, 20 bp, Artificial Sequence
  chemically synthesized
gcatgcttgtgaagtgcctc

SEQ ID NO: 69397 - DNA, 20 bp, Artificial Sequence
  chemically synthesized
cttgtgaagtgcctcgggtg

SEQ ID NO: 69398 - DNA, 20 bp, Artificial Sequence
  chemically synthesized
agtgcctcgggtgaagtgcc

SEQ ID NO: 69399 - DNA, 20 bp, Artificial Sequence
  chemically synthesized
cgggtgaagtgcctggcaca

SEQ ID NO: 69400 - DNA, 20 bp, Artificial Sequence
  chemically synthesized
gtgaagtgcctggcacacag

SEQ ID NO: 69401 - DNA, 20 bp, Artificial Sequence
  chemically synthesized
tgaagtgcctggcacacagt

SEQ ID NO: 69402 - DNA, 20 bp, Artificial Sequence
  chemically synthesized
cacacagtaggctctttatg

SEQ ID NO: 69403 - DNA, 20 bp, Artificial Sequence
  chemically synthesized
acacagtaggctctttatgt

SEQ ID NO: 69404 - DNA, 20 bp, Artificial Sequence
  chemically synthesized
gctctttatgtgggtctgca

SEQ ID NO: 69405 - DNA, 20 bp, Artificial Sequence
  chemically synthesized
ggtctgcacagccctctgct

SEQ ID NO: 69406 - DNA, 20 bp, Artificial Sequence
  chemically synthesized
cctctgcttagtctgccccc

SEQ ID NO: 69407 - DNA, 20 bp, Artificial Sequence
  chemically synthesized
ctctgcttagtctgcccccc

SEQ ID NO: 69408 - DNA, 20 bp, Artificial Sequence
  chemically synthesized
agtctgccccccaggctgct

SEQ ID NO: 69409 - DNA, 20 bp, Artificial Sequence
  chemically synthesized
tctgccccccaggctgctca

SEQ ID NO: 69410 - DNA, 20 bp, Artificial Sequence
  chemically synthesized
gccccccaggctgctcagag

SEQ ID NO: 69411 - DNA, 20 bp, Artificial Sequence
  chemically synthesized
ccccccaggctgctcagagc

SEQ ID NO: 69412 - DNA, 20 bp, Artificial Sequence
  chemically synthesized
ccccaggctgctcagagcag

SEQ ID NO: 69413 - DNA, 20 bp, Artificial Sequence
  chemically synthesized
cccaggctgctcagagcagg

SEQ ID NO: 69414 - DNA, 20 bp, Artificial Sequence
  chemically synthesized
caggctgctcagagcaggag

SEQ ID NO: 69415 - DNA, 20 bp, Artificial Sequence
  chemically synthesized
aggctgctcagagcaggagg

SEQ ID NO: 69416 - DNA, 20 bp, Artificial Sequence
  chemically synthesized
ggaggaggttcaattttgac

SEQ ID NO: 69417 - DNA, 20 bp, Artificial Sequence
  chemically synthesized
ggttcaattttgaccagcct

SEQ ID NO: 69418 - DNA, 20 bp, Artificial Sequence
  chemically synthesized
gttcaattttgaccagcctc

SEQ ID NO: 69419 - DNA, 20 bp, Artificial Sequence
  chemically synthesized
cctgtttctgtttttgctcc

SEQ ID NO: 69420 - DNA, 20 bp, Artificial Sequence
  chemically synthesized
tgtttttgctcctggaaaac

SEQ ID NO: 69421 - DNA, 20 bp, Artificial Sequence
  chemically synthesized
aaaccagtgtgatccgtata

SEQ ID NO: 69422 - DNA, 20 bp, Artificial Sequence
  chemically synthesized
agtgtgatccgtatacagct

SEQ ID NO: 69423 - DNA, 20 bp, Artificial Sequence
  chemically synthesized
tgtgatccgtatacagcttg

SEQ ID NO: 69424 - DNA, 20 bp, Artificial Sequence
  chemically synthesized
tatacagcttggagtttctt

SEQ ID NO: 69425 - DNA, 20 bp, Artificial Sequence
  chemically synthesized
ttggagtttctttggataca

SEQ ID NO: 69426 - DNA, 20 bp, Artificial Sequence
  chemically synthesized
tggatacatggcccccactc

SEQ ID NO: 69427 - DNA, 20 bp, Artificial Sequence
  chemically synthesized
ggatacatggcccccactct

SEQ ID NO: 69428 - DNA, 20 bp, Artificial Sequence
  chemically synthesized
gatacatggcccccactctg

SEQ ID NO: 69429 - DNA, 20 bp, Artificial Sequence
  chemically synthesized
ggcccccactctggggttgt

SEQ ID NO: 69430 - DNA, 20 bp, Artificial Sequence
  chemically synthesized
cccccactctggggttgttg

SEQ ID NO: 69431 - DNA, 20 bp, Artificial Sequence
  chemically synthesized
ccccactctggggttgttgg

SEQ ID NO: 69432 - DNA, 20 bp, Artificial Sequence
  chemically synthesized
ctggggttgttggaggcctt

SEQ ID NO: 69433 - DNA, 20 bp, Artificial Sequence
  chemically synthesized
ggggttgttggaggcctttg

SEQ ID NO: 69434 - DNA, 20 bp, Artificial Sequence
  chemically synthesized
tggaggcctttggagactgc

SEQ ID NO: 69435 - DNA, 20 bp, Artificial Sequence
  chemically synthesized
ggaggcctttggagactgct

SEQ ID NO: 69436 - DNA, 20 bp, Artificial Sequence
  chemically synthesized
gaggcctttggagactgctg

SEQ ID NO: 69437 - DNA, 20 bp, Artificial Sequence
  chemically synthesized
aggcctttggagactgctgg

SEQ ID NO: 69438 - DNA, 20 bp, Artificial Sequence
  chemically synthesized
cctttggagactgctggggg

SEQ ID NO: 69439 - DNA, 20 bp, Artificial Sequence
  chemically synthesized
tttggagactgctgggggtg

SEQ ID NO: 69440 - DNA, 20 bp, Artificial Sequence
  chemically synthesized
ttggagactgctgggggtgg

SEQ ID NO: 69441 - DNA, 20 bp, Artificial Sequence
  chemically synthesized
tggagactgctgggggtgga

SEQ ID NO: 69442 - DNA, 20 bp, Artificial Sequence
  chemically synthesized
ggagactgctgggggtggag

SEQ ID NO: 69443 - DNA, 20 bp, Artificial Sequence
  chemically synthesized
agactgctgggggtggaggg

SEQ ID NO: 69444 - DNA, 20 bp, Artificial Sequence
  chemically synthesized
gactgctgggggtggagggg

SEQ ID NO: 69445 - DNA, 20 bp, Artificial Sequence
  chemically synthesized
actgctgggggtggagggga

SEQ ID NO: 69446 - DNA, 20 bp, Artificial Sequence
  chemically synthesized
ctgctgggggtggaggggag

SEQ ID NO: 69447 - DNA, 20 bp, Artificial Sequence
  chemically synthesized
gctgggggtggaggggaggg

SEQ ID NO: 69448 - DNA, 20 bp, Artificial Sequence
  chemically synthesized
ctgggggtggaggggagggg

SEQ ID NO: 69449 - DNA, 20 bp, Artificial Sequence
  chemically synthesized
ggtggaggggaggggaggta

SEQ ID NO: 69450 - DNA, 20 bp, Artificial Sequence
  chemically synthesized
gtggaggggaggggaggtac

SEQ ID NO: 69451 - DNA, 20 bp, Artificial Sequence
  chemically synthesized
tggaggggaggggaggtaca

SEQ ID NO: 69452 - DNA, 20 bp, Artificial Sequence
  chemically synthesized
gggaggggaggtacagggtt

SEQ ID NO: 69453 - DNA, 20 bp, Artificial Sequence
  chemically synthesized
ggaggggaggtacagggttg

SEQ ID NO: 69454 - DNA, 20 bp, Artificial Sequence
  chemically synthesized
gggaggtacagggttgaggc

SEQ ID NO: 69455 - DNA, 20 bp, Artificial Sequence
  chemically synthesized
aggtacagggttgaggctag

SEQ ID NO: 69456 - DNA, 20 bp, Artificial Sequence
  chemically synthesized
ggtacagggttgaggctagt

SEQ ID NO: 69457 - DNA, 20 bp, Artificial Sequence
  chemically synthesized
gtacagggttgaggctagtg

SEQ ID NO: 69458 - DNA, 20 bp, Artificial Sequence
  chemically synthesized
cttgattgcaatccctttaa

SEQ ID NO: 69459 - DNA, 20 bp, Artificial Sequence
  chemically synthesized
atccctttaaaagcctaaat

SEQ ID NO: 69460 - DNA, 20 bp, Artificial Sequence
  chemically synthesized
gtgcaacccgcaaacctgct

SEQ ID NO: 69461 - DNA, 20 bp, Artificial Sequence
  chemically synthesized
tgcaacccgcaaacctgctt

SEQ ID NO: 69462 - DNA, 20 bp, Artificial Sequence
  chemically synthesized
caacccgcaaacctgcttgg

SEQ ID NO: 69463 - DNA, 20 bp, Artificial Sequence
  chemically synthesized
ccgcaaacctgcttgggagc

SEQ ID NO: 69464 - DNA, 20 bp, Artificial Sequence
  chemically synthesized
gggagctggcgtacgtgccg

SEQ ID NO: 69465 - DNA, 20 bp, Artificial Sequence
  chemically synthesized
gtacgtgccgtagatacttg

SEQ ID NO: 69466 - DNA, 20 bp, Artificial Sequence
  chemically synthesized
acgtgccgtagatacttgca

SEQ ID NO: 69467 - DNA, 20 bp, Artificial Sequence
  chemically synthesized
gtagatacttgcagagtgaa

SEQ ID NO: 69468 - DNA, 20 bp, Artificial Sequence
  chemically synthesized
tacttgcagagtgaatggat

SEQ ID NO: 69469 - DNA, 20 bp, Artificial Sequence
  chemically synthesized
ttgccccttctgtcattcac

SEQ ID NO: 69470 - DNA, 20 bp, Artificial Sequence
  chemically synthesized
tcccatttatgcctccacct

SEQ ID NO: 69471 - DNA, 20 bp, Artificial Sequence
  chemically synthesized
cccatttatgcctccacctt

SEQ ID NO: 69472 - DNA, 20 bp, Artificial Sequence
  chemically synthesized
ccatttatgcctccaccttg

SEQ ID NO: 69473 - DNA, 20 bp, Artificial Sequence
  chemically synthesized
cctccaccttggggctctac

SEQ ID NO: 69474 - DNA, 20 bp, Artificial Sequence
  chemically synthesized
ctccaccttggggctctacc

SEQ ID NO: 69475 - DNA, 20 bp, Artificial Sequence
  chemically synthesized
accttggggctctaccaggc

SEQ ID NO: 69476 - DNA, 20 bp, Artificial Sequence
  chemically synthesized
tctaccaggcgagtgaccca

SEQ ID NO: 69477 - DNA, 20 bp, Artificial Sequence
  chemically synthesized
ctaccaggcgagtgacccac

SEQ ID NO: 69478 - DNA, 20 bp, Artificial Sequence
  chemically synthesized
gagtgacccacaggatcctc

SEQ ID NO: 69479 - DNA, 20 bp, Artificial Sequence
  chemically synthesized
gatcctccagcacacacatt

SEQ ID NO: 69480 - DNA, 20 bp, Artificial Sequence
  chemically synthesized
tccagcacacacattcagac

SEQ ID NO: 69481 - DNA, 20 bp, Artificial Sequence
  chemically synthesized
ccagcacacacattcagacc

SEQ ID NO: 69482 - DNA, 20 bp, Artificial Sequence
  chemically synthesized
cagcacacacattcagacca

SEQ ID NO: 69483 - DNA, 20 bp, Artificial Sequence
  chemically synthesized
agaccagggaacccacttac

SEQ ID NO: 69484 - DNA, 20 bp, Artificial Sequence
  chemically synthesized
ggaacccacttactggctgt

SEQ ID NO: 69485 - DNA, 20 bp, Artificial Sequence
  chemically synthesized
gaacccacttactggctgtg

SEQ ID NO: 69486 - DNA, 20 bp, Artificial Sequence
  chemically synthesized
acttactggctgtgaggcct

SEQ ID NO: 69487 - DNA, 20 bp, Artificial Sequence
  chemically synthesized
cttactggctgtgaggcctc

SEQ ID NO: 69488 - DNA, 20 bp, Artificial Sequence
  chemically synthesized
ctggctgtgaggcctcaggt

SEQ ID NO: 69489 - DNA, 20 bp, Artificial Sequence
  chemically synthesized
gtgagttgtttaaccgctcc

SEQ ID NO: 69490 - DNA, 20 bp, Artificial Sequence
  chemically synthesized
caatttccctatctgtaaaa

SEQ ID NO: 69491 - DNA, 20 bp, Artificial Sequence
  chemically synthesized
aatttccctatctgtaaaat

SEQ ID NO: 69492 - DNA, 20 bp, Artificial Sequence
  chemically synthesized
atttccctatctgtaaaatg

SEQ ID NO: 69493 - DNA, 20 bp, Artificial Sequence
  chemically synthesized
ccctatctgtaaaatgggga

SEQ ID NO: 69494 - DNA, 20 bp, Artificial Sequence
  chemically synthesized
ctgtaaaatggggatggtga

SEQ ID NO: 69495 - DNA, 20 bp, Artificial Sequence
  chemically synthesized
gtgacggtatgtaccttgtt

SEQ ID NO: 69496 - DNA, 20 bp, Artificial Sequence
  chemically synthesized
gtaccttgttgagctgctgt

SEQ ID NO: 69497 - DNA, 20 bp, Artificial Sequence
  chemically synthesized
taccttgttgagctgctgtg

SEQ ID NO: 69498 - DNA, 20 bp, Artificial Sequence
  chemically synthesized
ctgtgaggattaaaatgcaa

SEQ ID NO: 69499 - DNA, 20 bp, Artificial Sequence
  chemically synthesized
ggattaaaatgcaacagttc

SEQ ID NO: 69500 - DNA, 20 bp, Artificial Sequence
  chemically synthesized
gattaaaatgcaacagttca

SEQ ID NO: 69501 - DNA, 20 bp, Artificial Sequence
  chemically synthesized
aaaatgcaacagttcaagga

SEQ ID NO: 69502 - DNA, 20 bp, Artificial Sequence
  chemically synthesized
gcaacagttcaaggaaagct

SEQ ID NO: 69503 - DNA, 20 bp, Artificial Sequence
  chemically synthesized
aacagttcaaggaaagctca

SEQ ID NO: 69504 - DNA, 20 bp, Artificial Sequence
  chemically synthesized
gttcaaggaaagctcagaga

SEQ ID NO: 69505 - DNA, 20 bp, Artificial Sequence
  chemically synthesized
ttcaaggaaagctcagagac

SEQ ID NO: 69506 - DNA, 20 bp, Artificial Sequence
  chemically synthesized
gaaagctcagagacgggtac

SEQ ID NO: 69507 - DNA, 20 bp, Artificial Sequence
  chemically synthesized
aaagctcagagacgggtact

SEQ ID NO: 69508 - DNA, 20 bp, Artificial Sequence
  chemically synthesized
agacgggtactgggtgtgcc

SEQ ID NO: 69509 - DNA, 20 bp, Artificial Sequence
  chemically synthesized
gggtactgggtgtgcccaga

SEQ ID NO: 69510 - DNA, 20 bp, Artificial Sequence
  chemically synthesized
ctgccctccctcccccgtgt

SEQ ID NO: 69511 - DNA, 20 bp, Artificial Sequence
  chemically synthesized
tgccctccctcccccgtgtc

SEQ ID NO: 69512 - DNA, 20 bp, Artificial Sequence
  chemically synthesized
gccctccctcccccgtgtca

SEQ ID NO: 69513 - DNA, 20 bp, Artificial Sequence
  chemically synthesized
ccctccctcccccgtgtcag

SEQ ID NO: 69514 - DNA, 20 bp, Artificial Sequence
  chemically synthesized
ccctcccccgtgtcaggggc

SEQ ID NO: 69515 - DNA, 20 bp, Artificial Sequence
  chemically synthesized
gtgtcaggggctggtgtcac

SEQ ID NO: 69516 - DNA, 20 bp, Artificial Sequence
  chemically synthesized
tgtcaggggctggtgtcact

SEQ ID NO: 69517 - DNA, 20 bp, Artificial Sequence
  chemically synthesized
gtcaggggctggtgtcactg

SEQ ID NO: 69518 - DNA, 20 bp, Artificial Sequence
  chemically synthesized
aggggctggtgtcactgggg

SEQ ID NO: 69519 - DNA, 20 bp, Artificial Sequence
  chemically synthesized
ggggctggtgtcactggggt

SEQ ID NO: 69520 - DNA, 20 bp, Artificial Sequence
  chemically synthesized
gggctggtgtcactggggtg

SEQ ID NO: 69521 - DNA, 20 bp, Artificial Sequence
  chemically synthesized
ctggtgtcactggggtgggg

SEQ ID NO: 69522 - DNA, 20 bp, Artificial Sequence
  chemically synthesized
tggtgtcactggggtggggt

SEQ ID NO: 69523 - DNA, 20 bp, Artificial Sequence
  chemically synthesized
ggtggggtgggccacacttg

SEQ ID NO: 69524 - DNA, 20 bp, Artificial Sequence
  chemically synthesized
tggggtgggccacacttgaa

SEQ ID NO: 69525 - DNA, 20 bp, Artificial Sequence
  chemically synthesized
acacttgaagagctttcctc

SEQ ID NO: 69526 - DNA, 20 bp, Artificial Sequence
  chemically synthesized
cacttgaagagctttcctcc

SEQ ID NO: 69527 - DNA, 20 bp, Artificial Sequence
  chemically synthesized
ttgaagagctttcctccagg

SEQ ID NO: 69528 - DNA, 20 bp, Artificial Sequence
  chemically synthesized
cctccaggcagtctctcatt

SEQ ID NO: 69529 - DNA, 20 bp, Artificial Sequence
  chemically synthesized
tctcattcagttaccctgtg

SEQ ID NO: 69530 - DNA, 20 bp, Artificial Sequence
  chemically synthesized
ctcattcagttaccctgtga

SEQ ID NO: 69531 - DNA, 20 bp, Artificial Sequence
  chemically synthesized
tcattcagttaccctgtgaa

SEQ ID NO: 69532 - DNA, 20 bp, Artificial Sequence
  chemically synthesized
attcagttaccctgtgaagg

SEQ ID NO: 69533 - DNA, 20 bp, Artificial Sequence
  chemically synthesized
cagttaccctgtgaagggag

SEQ ID NO: 69534 - DNA, 20 bp, Artificial Sequence
  chemically synthesized
agttaccctgtgaagggagt

SEQ ID NO: 69535 - DNA, 20 bp, Artificial Sequence
  chemically synthesized
agtaggtaccaccctccttt

SEQ ID NO: 69536 - DNA, 20 bp, Artificial Sequence
  chemically synthesized
gtaggtaccaccctcctttc

SEQ ID NO: 69537 - DNA, 20 bp, Artificial Sequence
  chemically synthesized
ggtaccaccctcctttcagg

SEQ ID NO: 69538 - DNA, 20 bp, Artificial Sequence
  chemically synthesized
accaccctcctttcaggcag

SEQ ID NO: 69539 - DNA, 20 bp, Artificial Sequence
  chemically synthesized
ccaccctcctttcaggcagc

SEQ ID NO: 69540 - DNA, 20 bp, Artificial Sequence
  chemically synthesized
ctttcaggcagcgggaaact

SEQ ID NO: 69541 - DNA, 20 bp, Artificial Sequence
  chemically synthesized
aggcagcgggaaactgagct

SEQ ID NO: 69542 - DNA, 20 bp, Artificial Sequence
  chemically synthesized
actcccctccccttctctct

SEQ ID NO: 69543 - DNA, 20 bp, Artificial Sequence
  chemically synthesized
tctctgagctcccttccctg

SEQ ID NO: 69544 - DNA, 20 bp, Artificial Sequence
  chemically synthesized
ttccctgcagctccatcccc

SEQ ID NO: 69545 - DNA, 20 bp, Artificial Sequence
  chemically synthesized
gcagctccatcccctggctt

SEQ ID NO: 69546 - DNA, 20 bp, Artificial Sequence
  chemically synthesized
cagctccatcccctggcttc

SEQ ID NO: 69547 - DNA, 20 bp, Artificial Sequence
  chemically synthesized
agctccatcccctggcttca

SEQ ID NO: 69548 - DNA, 20 bp, Artificial Sequence
  chemically synthesized
agggcccctgtccttcccct

SEQ ID NO: 69549 - DNA, 20 bp, Artificial Sequence
  chemically synthesized
cccctgtccttcccctgagc

SEQ ID NO: 69550 - DNA, 20 bp, Artificial Sequence
  chemically synthesized
cttcccctgagctggctgaa

SEQ ID NO: 69551 - DNA, 20 bp, Artificial Sequence
  chemically synthesized
cgctgctctacatccactca

SEQ ID NO: 69552 - DNA, 20 bp, Artificial Sequence
  chemically synthesized
tctacatccactcacagctc

SEQ ID NO: 69553 - DNA, 20 bp, Artificial Sequence
  chemically synthesized
tccactcacagctccagcac

SEQ ID NO: 69554 - DNA, 20 bp, Artificial Sequence
  chemically synthesized
ccactcacagctccagcact

SEQ ID NO: 69555 - DNA, 20 bp, Artificial Sequence
  chemically synthesized
acagctccagcactgggctg

SEQ ID NO: 69556 - DNA, 20 bp, Artificial Sequence
  chemically synthesized
tccagcactgggctgtggtt

SEQ ID NO: 69557 - DNA, 20 bp, Artificial Sequence
  chemically synthesized
ccagcactgggctgtggttg

SEQ ID NO: 69558 - DNA, 20 bp, Artificial Sequence
  chemically synthesized
tggttgaggtcgcctgccct

SEQ ID NO: 69559 - DNA, 20 bp, Artificial Sequence
  chemically synthesized
ttgaggtcgcctgccctcgg

SEQ ID NO: 69560 - DNA, 20 bp, Artificial Sequence
  chemically synthesized
cgcctgccctcggtagctcc

SEQ ID NO: 69561 - DNA, 20 bp, Artificial Sequence
  chemically synthesized
gcctgccctcggtagctcct

SEQ ID NO: 69562 - DNA, 20 bp, Artificial Sequence
  chemically synthesized
tgggcatttcttcccctctc

SEQ ID NO: 69563 - DNA, 20 bp, Artificial Sequence
  chemically synthesized
gggcatttcttcccctctct

SEQ ID NO: 69564 - DNA, 20 bp, Artificial Sequence
  chemically synthesized
tgcacaatgacccccactct

SEQ ID NO: 69565 - DNA, 20 bp, Artificial Sequence
  chemically synthesized
cctgctgtccctcccacctg

SEQ ID NO: 69566 - DNA, 20 bp, Artificial Sequence
  chemically synthesized
tccctcccacctgtggaact

SEQ ID NO: 69567 - DNA, 20 bp, Artificial Sequence
  chemically synthesized
tcccacctgtggaactgagt

SEQ ID NO: 69568 - DNA, 20 bp, Artificial Sequence
  chemically synthesized
cacctgtggaactgagtgag

SEQ ID NO: 69569 - DNA, 20 bp, Artificial Sequence
  chemically synthesized
ctgtggaactgagtgagcag

SEQ ID NO: 69570 - DNA, 20 bp, Artificial Sequence
  chemically synthesized
tggaactgagtgagcagcag

SEQ ID NO: 69571 - DNA, 20 bp, Artificial Sequence
  chemically synthesized
ccacctttcctgctctcctc

SEQ ID NO: 69572 - DNA, 20 bp, Artificial Sequence
  chemically synthesized
gctctcctcaagctctcctc

SEQ ID NO: 69573 - DNA, 20 bp, Artificial Sequence
  chemically synthesized
tcctcaagctctgtctcttc

SEQ ID NO: 69574 - DNA, 20 bp, Artificial Sequence
  chemically synthesized
tcaagctctgtctcttctgg

SEQ ID NO: 69575 - DNA, 20 bp, Artificial Sequence
  chemically synthesized
caagctctgtctcttctggc

SEQ ID NO: 69576 - DNA, 20 bp, Artificial Sequence
  chemically synthesized
tctgtctcttctggcaggca

SEQ ID NO: 69577 - DNA, 20 bp, Artificial Sequence
  chemically synthesized
ctgtctcttctggcaggcac

SEQ ID NO: 69578 - DNA, 20 bp, Artificial Sequence
  chemically synthesized
gtctcttctggcaggcacag

SEQ ID NO: 69579 - DNA, 20 bp, Artificial Sequence
  chemically synthesized
ctcttctggcaggcacagga

SEQ ID NO: 69580 - DNA, 20 bp, Artificial Sequence
  chemically synthesized
ttctggcaggcacaggagag

SEQ ID NO: 69581 - DNA, 20 bp, Artificial Sequence
  chemically synthesized
aggcacaggagagtggcctg

SEQ ID NO: 69582 - DNA, 20 bp, Artificial Sequence
  chemically synthesized
ggcacaggagagtggcctga

SEQ ID NO: 69583 - DNA, 20 bp, Artificial Sequence
  chemically synthesized
caggagagtggcctgaaggc

SEQ ID NO: 69584 - DNA, 20 bp, Artificial Sequence
  chemically synthesized
gagagtggcctgaaggctgg

SEQ ID NO: 69585 - DNA, 20 bp, Artificial Sequence
  chemically synthesized
agagtggcctgaaggctggc

SEQ ID NO: 69586 - DNA, 20 bp, Artificial Sequence
  chemically synthesized
agtggcctgaaggctggcag

SEQ ID NO: 69587 - DNA, 20 bp, Artificial Sequence
  chemically synthesized
gtggcctgaaggctggcagg

SEQ ID NO: 69588 - DNA, 20 bp, Artificial Sequence
  chemically synthesized
aggttgccgcccctccaacc

SEQ ID NO: 69589 - DNA, 20 bp, Artificial Sequence
  chemically synthesized
cccctccaacctggaattcc

SEQ ID NO: 69590 - DNA, 20 bp, Artificial Sequence
  chemically synthesized
ctccaacctggaattcctgg

SEQ ID NO: 69591 - DNA, 20 bp, Artificial Sequence
  chemically synthesized
caacctggaattcctggcag

SEQ ID NO: 69592 - DNA, 20 bp, Artificial Sequence
  chemically synthesized
cctggaattcctggcagcag

SEQ ID NO: 69593 - DNA, 20 bp, Artificial Sequence
  chemically synthesized
ggaattcctggcagcagcag

SEQ ID NO: 69594 - DNA, 20 bp, Artificial Sequence
  chemically synthesized
ttcctggcagcagcagcggc

SEQ ID NO: 69595 - DNA, 20 bp, Artificial Sequence
  chemically synthesized
tcctggcagcagcagcggct

SEQ ID NO: 69596 - DNA, 20 bp, Artificial Sequence
  chemically synthesized
agcagcggctaggccttcct

SEQ ID NO: 69597 - DNA, 20 bp, Artificial Sequence
  chemically synthesized
cagcggctaggccttcctcg

SEQ ID NO: 69598 - DNA, 20 bp, Artificial Sequence
  chemically synthesized
agcggctaggccttcctcgg

SEQ ID NO: 69599 - DNA, 20 bp, Artificial Sequence
  chemically synthesized
cccgaccccctcctccttct

SEQ ID NO: 69600 - DNA, 20 bp, Artificial Sequence
  chemically synthesized
ccccctcctccttcttggtt

SEQ ID NO: 69601 - DNA, 20 bp, Artificial Sequence
  chemically synthesized
tcctccttcttggttcagct

SEQ ID NO: 69602 - DNA, 20 bp, Artificial Sequence
  chemically synthesized
cctccttcttggttcagctc

SEQ ID NO: 69603 - DNA, 20 bp, Artificial Sequence
  chemically synthesized
ttggttcagctcaggactct

SEQ ID NO: 69604 - DNA, 20 bp, Artificial Sequence
  chemically synthesized
tggttcagctcaggactctg

SEQ ID NO: 69605 - DNA, 20 bp, Artificial Sequence
  chemically synthesized
ggttcagctcaggactctga

SEQ ID NO: 69606 - DNA, 20 bp, Artificial Sequence
  chemically synthesized
ggactctgagggttgctgcg

SEQ ID NO: 69607 - DNA, 20 bp, Artificial Sequence
  chemically synthesized
actctgagggttgctgcgtg

SEQ ID NO: 69608 - DNA, 20 bp, Artificial Sequence
  chemically synthesized
ctctgagggttgctgcgtgg

SEQ ID NO: 69609 - DNA, 20 bp, Artificial Sequence
  chemically synthesized
tgagggttgctgcgtggagg

SEQ ID NO: 69610 - DNA, 20 bp, Artificial Sequence
  chemically synthesized
cgtggaggcagtgcatgccc

SEQ ID NO: 69611 - DNA, 20 bp, Artificial Sequence
  chemically synthesized
gtggaggcagtgcatgccct

SEQ ID NO: 69612 - DNA, 20 bp, Artificial Sequence
  chemically synthesized
ggcagtgcatgccctgggca

SEQ ID NO: 69613 - DNA, 20 bp, Artificial Sequence
  chemically synthesized
catgccctgggcacagtgcc

SEQ ID NO: 69614 - DNA, 20 bp, Artificial Sequence
  chemically synthesized
gtgcccagttcctgcccacc

SEQ ID NO: 69615 - DNA, 20 bp, Artificial Sequence
  chemically synthesized
tgcccagttcctgcccaccc

SEQ ID NO: 69616 - DNA, 20 bp, Artificial Sequence
  chemically synthesized
ccagttcctgcccacccagg

SEQ ID NO: 69617 - DNA, 20 bp, Artificial Sequence
  chemically synthesized
gttcctgcccacccaggaag

SEQ ID NO: 69618 - DNA, 20 bp, Artificial Sequence
  chemically synthesized
cccacccaggaagtagactt

SEQ ID NO: 69619 - DNA, 20 bp, Artificial Sequence
  chemically synthesized
ccacccaggaagtagacttc

SEQ ID NO: 69620 - DNA, 20 bp, Artificial Sequence
  chemically synthesized
cccaggaagtagacttcggg

SEQ ID NO: 69621 - DNA, 20 bp, Artificial Sequence
  chemically synthesized
caggaagtagacttcgggtg

SEQ ID NO: 69622 - DNA, 20 bp, Artificial Sequence
  chemically synthesized
aggaagtagacttcgggtgg

SEQ ID NO: 69623 - DNA, 20 bp, Artificial Sequence
  chemically synthesized
aagtagacttcgggtggagg

SEQ ID NO: 69624 - DNA, 20 bp, Artificial Sequence
  chemically synthesized
tagacttcgggtggaggcag

SEQ ID NO: 69625 - DNA, 20 bp, Artificial Sequence
  chemically synthesized
agacttcgggtggaggcagt

SEQ ID NO: 69626 - DNA, 20 bp, Artificial Sequence
  chemically synthesized
ttcgggtggaggcagtaggc

SEQ ID NO: 69627 - DNA, 20 bp, Artificial Sequence
  chemically synthesized
tcgggtggaggcagtaggct

SEQ ID NO: 69628 - DNA, 20 bp, Artificial Sequence
  chemically synthesized
cgggtggaggcagtaggctg

SEQ ID NO: 69629 - DNA, 20 bp, Artificial Sequence
  chemically synthesized
ggtggaggcagtaggctggg

SEQ ID NO: 69630 - DNA, 20 bp, Artificial Sequence
  chemically synthesized
gtggaggcagtaggctgggg

SEQ ID NO: 69631 - DNA, 20 bp, Artificial Sequence
  chemically synthesized
tggaggcagtaggctgggga

SEQ ID NO: 69632 - DNA, 20 bp, Artificial Sequence
  chemically synthesized
ggaggcagtaggctggggag

SEQ ID NO: 69633 - DNA, 20 bp, Artificial Sequence
  chemically synthesized
ggcagtaggctggggagggg

SEQ ID NO: 69634 - DNA, 20 bp, Artificial Sequence
  chemically synthesized
gcagtaggctggggaggggc

SEQ ID NO: 69635 - DNA, 20 bp, Artificial Sequence
  chemically synthesized
cagtaggctggggaggggcg

SEQ ID NO: 69636 - DNA, 20 bp, Artificial Sequence
  chemically synthesized
gtaggctggggaggggcggg

SEQ ID NO: 69637 - DNA, 20 bp, Artificial Sequence
  chemically synthesized
ctggggaggggcggggagct

SEQ ID NO: 69638 - DNA, 20 bp, Artificial Sequence
  chemically synthesized
ggaggggcggggagcttgga

SEQ ID NO: 69639 - DNA, 20 bp, Artificial Sequence
  chemically synthesized
gaggggcggggagcttggac

SEQ ID NO: 69640 - DNA, 20 bp, Artificial Sequence
  chemically synthesized
gggcggggagcttggacagg

SEQ ID NO: 69641 - DNA, 20 bp, Artificial Sequence
  chemically synthesized
ggcggggagcttggacagga

SEQ ID NO: 69642 - DNA, 20 bp, Artificial Sequence
  chemically synthesized
cggggagcttggacaggaag

SEQ ID NO: 69643 - DNA, 20 bp, Artificial Sequence
  chemically synthesized
aaggagccttgctcattgcc

SEQ ID NO: 69644 - DNA, 20 bp, Artificial Sequence
  chemically synthesized
gagccttgctcattgcccgg

SEQ ID NO: 69645 - DNA, 20 bp, Artificial Sequence
  chemically synthesized
gctcattgcccggcagacac

SEQ ID NO: 69646 - DNA, 20 bp, Artificial Sequence
  chemically synthesized
ttgcccggcagacacaagac

SEQ ID NO: 69647 - DNA, 20 bp, Artificial Sequence
  chemically synthesized
tgcccggcagacacaagact

SEQ ID NO: 69648 - DNA, 20 bp, Artificial Sequence
  chemically synthesized
agactgggccctcataaact

SEQ ID NO: 69649 - DNA, 20 bp, Artificial Sequence
  chemically synthesized
tgggccctcataaactcaga

SEQ ID NO: 69650 - DNA, 20 bp, Artificial Sequence
  chemically synthesized
cctcataaactcagacagcc

SEQ ID NO: 69651 - DNA, 20 bp, Artificial Sequence
  chemically synthesized
acctgttgtacctgcccttt

SEQ ID NO: 69652 - DNA, 20 bp, Artificial Sequence
  chemically synthesized
gccctttcagctctgtgacc

SEQ ID NO: 69653 - DNA, 20 bp, Artificial Sequence
  chemically synthesized
ccctttcagctctgtgaccc

SEQ ID NO: 69654 - DNA, 20 bp, Artificial Sequence
  chemically synthesized
tcagctctgtgacccgggac

SEQ ID NO: 69655 - DNA, 20 bp, Artificial Sequence
  chemically synthesized
acaagtcaccctctcccttt

SEQ ID NO: 69656 - DNA, 20 bp, Artificial Sequence
  chemically synthesized
ctctccctttgagttgccgc

SEQ ID NO: 69657 - DNA, 20 bp, Artificial Sequence
  chemically synthesized
ctccctttgagttgccgcaa

SEQ ID NO: 69658 - DNA, 20 bp, Artificial Sequence
  chemically synthesized
tccctttgagttgccgcaag

SEQ ID NO: 69659 - DNA, 20 bp, Artificial Sequence
  chemically synthesized
ttgagttgccgcaagaggta

SEQ ID NO: 69660 - DNA, 20 bp, Artificial Sequence
  chemically synthesized
agaggtacagtcacactgcc

SEQ ID NO: 69661 - DNA, 20 bp, Artificial Sequence
  chemically synthesized
aggtacagtcacactgccca

SEQ ID NO: 69662 - DNA, 20 bp, Artificial Sequence
  chemically synthesized
ggtacagtcacactgcccag

SEQ ID NO: 69663 - DNA, 20 bp, Artificial Sequence
  chemically synthesized
cacactgcccagaggattac

SEQ ID NO: 69664 - DNA, 20 bp, Artificial Sequence
  chemically synthesized
cagaggattactagaaatga

SEQ ID NO: 69665 - DNA, 20 bp, Artificial Sequence
  chemically synthesized
agaggattactagaaatgac

SEQ ID NO: 69666 - DNA, 20 bp, Artificial Sequence
  chemically synthesized
aatgacaggcctcgccctcc

SEQ ID NO: 69667 - DNA, 20 bp, Artificial Sequence
  chemically synthesized
caggcctcgccctcctggca

SEQ ID NO: 69668 - DNA, 20 bp, Artificial Sequence
  chemically synthesized
tcgccctcctggcacagacc

SEQ ID NO: 69669 - DNA, 20 bp, Artificial Sequence
  chemically synthesized
acagacctggcaccaataac

SEQ ID NO: 69670 - DNA, 20 bp, Artificial Sequence
  chemically synthesized
gacctggcaccaataactgg

SEQ ID NO: 69671 - DNA, 20 bp, Artificial Sequence
  chemically synthesized
acctggcaccaataactggc

SEQ ID NO: 69672 - DNA, 20 bp, Artificial Sequence
  chemically synthesized
accaataactggcaggtttc

SEQ ID NO: 69673 - DNA, 20 bp, Artificial Sequence
  chemically synthesized
ccaataactggcaggtttct

SEQ ID NO: 69674 - DNA, 20 bp, Artificial Sequence
  chemically synthesized
caataactggcaggtttctg

SEQ ID NO: 69675 - DNA, 20 bp, Artificial Sequence
  chemically synthesized
aactggcaggtttctggggc

SEQ ID NO: 69676 - DNA, 20 bp, Artificial Sequence
  chemically synthesized
caggtttctggggccagctg

SEQ ID NO: 69677 - DNA, 20 bp, Artificial Sequence
  chemically synthesized
ggtttctggggccagctgca

SEQ ID NO: 69678 - DNA, 20 bp, Artificial Sequence
  chemically synthesized
gtttctggggccagctgcag

SEQ ID NO: 69679 - DNA, 20 bp, Artificial Sequence
  chemically synthesized
tttctggggccagctgcaga

SEQ ID NO: 69680 - DNA, 20 bp, Artificial Sequence
  chemically synthesized
ctggggccagctgcagaggg

SEQ ID NO: 69681 - DNA, 20 bp, Artificial Sequence
  chemically synthesized
ggggccagctgcagagggaa

SEQ ID NO: 69682 - DNA, 20 bp, Artificial Sequence
  chemically synthesized
gggccagctgcagagggaag

SEQ ID NO: 69683 - DNA, 20 bp, Artificial Sequence
  chemically synthesized
gctgcagagggaagaggact

SEQ ID NO: 69684 - DNA, 20 bp, Artificial Sequence
  chemically synthesized
tgagccacctatgaaatgcc

SEQ ID NO: 69685 - DNA, 20 bp, Artificial Sequence
  chemically synthesized
gccacctatgaaatgcccag

SEQ ID NO: 69686 - DNA, 20 bp, Artificial Sequence
  chemically synthesized
ccacctatgaaatgcccagt

SEQ ID NO: 69687 - DNA, 20 bp, Artificial Sequence
  chemically synthesized
cctatgaaatgcccagtggg

SEQ ID NO: 69688 - DNA, 20 bp, Artificial Sequence
  chemically synthesized
atgcccagtgggcagcccca

SEQ ID NO: 69689 - DNA, 20 bp, Artificial Sequence
  chemically synthesized
ccagtgggcagccccacagt

SEQ ID NO: 69690 - DNA, 20 bp, Artificial Sequence
  chemically synthesized
cagtgggcagccccacagtt

SEQ ID NO: 69691 - DNA, 20 bp, Artificial Sequence
  chemically synthesized
tgggcagccccacagttggg

SEQ ID NO: 69692 - DNA, 20 bp, Artificial Sequence
  chemically synthesized
gggcagccccacagttgggc

SEQ ID NO: 69693 - DNA, 20 bp, Artificial Sequence
  chemically synthesized
ttgggcaggtctgtgtgcac

SEQ ID NO: 69694 - DNA, 20 bp, Artificial Sequence
  chemically synthesized
tgggcaggtctgtgtgcact

SEQ ID NO: 69695 - DNA, 20 bp, Artificial Sequence
  chemically synthesized
gggcaggtctgtgtgcactg

SEQ ID NO: 69696 - DNA, 20 bp, Artificial Sequence
  chemically synthesized
gcaggtctgtgtgcactggg

SEQ ID NO: 69697 - DNA, 20 bp, Artificial Sequence
  chemically synthesized
caggtctgtgtgcactgggg

SEQ ID NO: 69698 - DNA, 20 bp, Artificial Sequence
  chemically synthesized
cactggggaggtgtgtgtca

SEQ ID NO: 69699 - DNA, 20 bp, Artificial Sequence
  chemically synthesized
actggggaggtgtgtgtcat

SEQ ID NO: 69700 - DNA, 20 bp, Artificial Sequence
  chemically synthesized
gaggtgtgtgtcataggacc

SEQ ID NO: 69701 - DNA, 20 bp, Artificial Sequence
  chemically synthesized
tcctatgacacacacctccc

SEQ ID NO: 69702 - DNA, 20 bp, Artificial Sequence
  chemically synthesized
acacacctccccagtgcaca

SEQ ID NO: 69703 - DNA, 20 bp, Artificial Sequence
  chemically synthesized
cacacagacctgcccaactg

SEQ ID NO: 69704 - DNA, 20 bp, Artificial Sequence
  chemically synthesized
acacagacctgcccaactgt

SEQ ID NO: 69705 - DNA, 20 bp, Artificial Sequence
  chemically synthesized
cacagacctgcccaactgtg

SEQ ID NO: 69706 - DNA, 20 bp, Artificial Sequence
  chemically synthesized
ccaactgtggggctgcccac

SEQ ID NO: 69707 - DNA, 20 bp, Artificial Sequence
  chemically synthesized
caactgtggggctgcccact

SEQ ID NO: 69708 - DNA, 20 bp, Artificial Sequence
  chemically synthesized
gctgcccactgggcatttca

SEQ ID NO: 69709 - DNA, 20 bp, Artificial Sequence
  chemically synthesized
ctgcccactgggcatttcat

SEQ ID NO: 69710 - DNA, 20 bp, Artificial Sequence
  chemically synthesized
cccactgggcatttcatagg

SEQ ID NO: 69711 - DNA, 20 bp, Artificial Sequence
  chemically synthesized
tgggcatttcataggtggct

SEQ ID NO: 69712 - DNA, 20 bp, Artificial Sequence
  chemically synthesized
gctcagtcctcttccctctg

SEQ ID NO: 69713 - DNA, 20 bp, Artificial Sequence
  chemically synthesized
agtcctcttccctctgcagc

SEQ ID NO: 69714 - DNA, 20 bp, Artificial Sequence
  chemically synthesized
cttccctctgcagctggccc

SEQ ID NO: 69715 - DNA, 20 bp, Artificial Sequence
  chemically synthesized
agctggccccagaaacctgc

SEQ ID NO: 69716 - DNA, 20 bp, Artificial Sequence
  chemically synthesized
cccagaaacctgccagttat

SEQ ID NO: 69717 - DNA, 20 bp, Artificial Sequence
  chemically synthesized
aacctgccagttattggtgc

SEQ ID NO: 69718 - DNA, 20 bp, Artificial Sequence
  chemically synthesized
acctgccagttattggtgcc

SEQ ID NO: 69719 - DNA, 20 bp, Artificial Sequence
  chemically synthesized
tattggtgccaggtctgtgc

SEQ ID NO: 69720 - DNA, 20 bp, Artificial Sequence
  chemically synthesized
attggtgccaggtctgtgcc

SEQ ID NO: 69721 - DNA, 20 bp, Artificial Sequence
  chemically synthesized
tggtgccaggtctgtgccag

SEQ ID NO: 69722 - DNA, 20 bp, Artificial Sequence
  chemically synthesized
ggtgccaggtctgtgccagg

SEQ ID NO: 69723 - DNA, 20 bp, Artificial Sequence
  chemically synthesized
gtgccaggtctgtgccagga

SEQ ID NO: 69724 - DNA, 20 bp, Artificial Sequence
  chemically synthesized
caggtctgtgccaggagggc

SEQ ID NO: 69725 - DNA, 20 bp, Artificial Sequence
  chemically synthesized
aggtctgtgccaggagggcg

SEQ ID NO: 69726 - DNA, 20 bp, Artificial Sequence
  chemically synthesized
agggcgaggcctgtcatttc

SEQ ID NO: 69727 - DNA, 20 bp, Artificial Sequence
  chemically synthesized
tgtcatttctagtaatcctc

SEQ ID NO: 69728 - DNA, 20 bp, Artificial Sequence
  chemically synthesized
gtcatttctagtaatcctct

SEQ ID NO: 69729 - DNA, 20 bp, Artificial Sequence
  chemically synthesized
atttctagtaatcctctggg

SEQ ID NO: 69730 - DNA, 20 bp, Artificial Sequence
  chemically synthesized
cagtgtgactgtacctcttg

SEQ ID NO: 69731 - DNA, 20 bp, Artificial Sequence
  chemically synthesized
gtacctcttgcggcaactca

SEQ ID NO: 69732 - DNA, 20 bp, Artificial Sequence
  chemically synthesized
tacctcttgcggcaactcaa

SEQ ID NO: 69733 - DNA, 20 bp, Artificial Sequence
  chemically synthesized
acctcttgcggcaactcaaa

SEQ ID NO: 69734 - DNA, 20 bp, Artificial Sequence
  chemically synthesized
ctcttgcggcaactcaaagg

SEQ ID NO: 69735 - DNA, 20 bp, Artificial Sequence
  chemically synthesized
cttgcggcaactcaaaggga

SEQ ID NO: 69736 - DNA, 20 bp, Artificial Sequence
  chemically synthesized
ttgcggcaactcaaagggag

SEQ ID NO: 69737 - DNA, 20 bp, Artificial Sequence
  chemically synthesized
tgcggcaactcaaagggaga

SEQ ID NO: 69738 - DNA, 20 bp, Artificial Sequence
  chemically synthesized
agggagagggtgacttgtcc

SEQ ID NO: 69739 - DNA, 20 bp, Artificial Sequence
  chemically synthesized
gggagagggtgacttgtccc

SEQ ID NO: 69740 - DNA, 20 bp, Artificial Sequence
  chemically synthesized
gggtgacttgtcccgggtca

SEQ ID NO: 69741 - DNA, 20 bp, Artificial Sequence
  chemically synthesized
gtgacttgtcccgggtcaca

SEQ ID NO: 69742 - DNA, 20 bp, Artificial Sequence
  chemically synthesized
gtcccgggtcacagagctga

SEQ ID NO: 69743 - DNA, 20 bp, Artificial Sequence
  chemically synthesized
tcccgggtcacagagctgaa

SEQ ID NO: 69744 - DNA, 20 bp, Artificial Sequence
  chemically synthesized
cccgggtcacagagctgaaa

SEQ ID NO: 69745 - DNA, 20 bp, Artificial Sequence
  chemically synthesized
gggtcacagagctgaaaggg

SEQ ID NO: 69746 - DNA, 20 bp, Artificial Sequence
  chemically synthesized
ggtcacagagctgaaagggc

SEQ ID NO: 69747 - DNA, 20 bp, Artificial Sequence
  chemically synthesized
agctgaaagggcaggtacaa

SEQ ID NO: 69748 - DNA, 20 bp, Artificial Sequence
  chemically synthesized
gctgaaagggcaggtacaac

SEQ ID NO: 69749 - DNA, 20 bp, Artificial Sequence
  chemically synthesized
aggtacaacaggtgacatgc

SEQ ID NO: 69750 - DNA, 20 bp, Artificial Sequence
  chemically synthesized
ggtacaacaggtgacatgcc

SEQ ID NO: 69751 - DNA, 20 bp, Artificial Sequence
  chemically synthesized
ggtgacatgccgggctgtct

SEQ ID NO: 69752 - DNA, 20 bp, Artificial Sequence
  chemically synthesized
gccgggctgtctgagtttat

SEQ ID NO: 69753 - DNA, 20 bp, Artificial Sequence
  chemically synthesized
ccgggctgtctgagtttatg

SEQ ID NO: 69754 - DNA, 20 bp, Artificial Sequence
  chemically synthesized
cgggctgtctgagtttatga

SEQ ID NO: 69755 - DNA, 20 bp, Artificial Sequence
  chemically synthesized
tgtctgagtttatgagggcc

SEQ ID NO: 69756 - DNA, 20 bp, Artificial Sequence
  chemically synthesized
gggcccagtcttgtgtctgc

SEQ ID NO: 69757 - DNA, 20 bp, Artificial Sequence
  chemically synthesized
ggcccagtcttgtgtctgcc

SEQ ID NO: 69758 - DNA, 20 bp, Artificial Sequence
  chemically synthesized
tcttgtgtctgccgggcaat

SEQ ID NO: 69759 - DNA, 20 bp, Artificial Sequence
  chemically synthesized
gtgtctgccgggcaatgagc

SEQ ID NO: 69760 - DNA, 20 bp, Artificial Sequence
  chemically synthesized
tgtctgccgggcaatgagca

SEQ ID NO: 69761 - DNA, 20 bp, Artificial Sequence
  chemically synthesized
agcaaggctccttcctgtcc

SEQ ID NO: 69762 - DNA, 20 bp, Artificial Sequence
  chemically synthesized
ccaagctccccgcccctccc

SEQ ID NO: 69763 - DNA, 20 bp, Artificial Sequence
  chemically synthesized
cagcctactgcctccacccg

SEQ ID NO: 69764 - DNA, 20 bp, Artificial Sequence
  chemically synthesized
tccacccgaagtctacttcc

SEQ ID NO: 69765 - DNA, 20 bp, Artificial Sequence
  chemically synthesized
ccacccgaagtctacttcct

SEQ ID NO: 69766 - DNA, 20 bp, Artificial Sequence
  chemically synthesized
cccgaagtctacttcctggg

SEQ ID NO: 69767 - DNA, 20 bp, Artificial Sequence
  chemically synthesized
ccgaagtctacttcctgggt

SEQ ID NO: 69768 - DNA, 20 bp, Artificial Sequence
  chemically synthesized
aagtctacttcctgggtggg

SEQ ID NO: 69769 - DNA, 20 bp, Artificial Sequence
  chemically synthesized
agtctacttcctgggtgggc

SEQ ID NO: 69770 - DNA, 20 bp, Artificial Sequence
  chemically synthesized
cttcctgggtgggcaggaac

SEQ ID NO: 69771 - DNA, 20 bp, Artificial Sequence
  chemically synthesized
ttcctgggtgggcaggaact

SEQ ID NO: 69772 - DNA, 20 bp, Artificial Sequence
  chemically synthesized
caggaactgggcactgtgcc

SEQ ID NO: 69773 - DNA, 20 bp, Artificial Sequence
  chemically synthesized
aggaactgggcactgtgccc

SEQ ID NO: 69774 - DNA, 20 bp, Artificial Sequence
  chemically synthesized
ggaactgggcactgtgccca

SEQ ID NO: 69775 - DNA, 20 bp, Artificial Sequence
  chemically synthesized
gggcatgcactgcctccacg

SEQ ID NO: 69776 - DNA, 20 bp, Artificial Sequence
  chemically synthesized
tgcctccacgcagcaaccct

SEQ ID NO: 69777 - DNA, 20 bp, Artificial Sequence
  chemically synthesized
cctccacgcagcaaccctca

SEQ ID NO: 69778 - DNA, 20 bp, Artificial Sequence
  chemically synthesized
gcagcaaccctcagagtcct

SEQ ID NO: 69779 - DNA, 20 bp, Artificial Sequence
  chemically synthesized
tcagagtcctgagctgaacc

SEQ ID NO: 69780 - DNA, 20 bp, Artificial Sequence
  chemically synthesized
gagtcctgagctgaaccaag

SEQ ID NO: 69781 - DNA, 20 bp, Artificial Sequence
  chemically synthesized
agtcctgagctgaaccaaga

SEQ ID NO: 69782 - DNA, 20 bp, Artificial Sequence
  chemically synthesized
tcctgagctgaaccaagaag

SEQ ID NO: 69783 - DNA, 20 bp, Artificial Sequence
  chemically synthesized
cctgagctgaaccaagaagg

SEQ ID NO: 69784 - DNA, 20 bp, Artificial Sequence
  chemically synthesized
tgagctgaaccaagaaggag

SEQ ID NO: 69785 - DNA, 20 bp, Artificial Sequence
  chemically synthesized
gagctgaaccaagaaggagg

SEQ ID NO: 69786 - DNA, 20 bp, Artificial Sequence
  chemically synthesized
agctgaaccaagaaggagga

SEQ ID NO: 69787 - DNA, 20 bp, Artificial Sequence
  chemically synthesized
gctgaaccaagaaggaggag

SEQ ID NO: 69788 - DNA, 20 bp, Artificial Sequence
  chemically synthesized
ctgaaccaagaaggaggagg

SEQ ID NO: 69789 - DNA, 20 bp, Artificial Sequence
  chemically synthesized
accaagaaggaggagggggt

SEQ ID NO: 69790 - DNA, 20 bp, Artificial Sequence
  chemically synthesized
ccaagaaggaggagggggtc

SEQ ID NO: 69791 - DNA, 20 bp, Artificial Sequence
  chemically synthesized
gaggagggggtcgggcctcc

SEQ ID NO: 69792 - DNA, 20 bp, Artificial Sequence
  chemically synthesized
aggagggggtcgggcctccg

SEQ ID NO: 69793 - DNA, 20 bp, Artificial Sequence
  chemically synthesized
agggggtcgggcctccgagg

SEQ ID NO: 69794 - DNA, 20 bp, Artificial Sequence
  chemically synthesized
gggggtcgggcctccgagga

SEQ ID NO: 69795 - DNA, 20 bp, Artificial Sequence
  chemically synthesized
tcgggcctccgaggaaggcc

SEQ ID NO: 69796 - DNA, 20 bp, Artificial Sequence
  chemically synthesized
ggcctagccgctgctgctgc

SEQ ID NO: 69797 - DNA, 20 bp, Artificial Sequence
  chemically synthesized
gcctagccgctgctgctgcc

SEQ ID NO: 69798 - DNA, 20 bp, Artificial Sequence
  chemically synthesized
gctgctgctgccaggaattc

SEQ ID NO: 69799 - DNA, 20 bp, Artificial Sequence
  chemically synthesized
ctgctgctgccaggaattcc

SEQ ID NO: 69800 - DNA, 20 bp, Artificial Sequence
  chemically synthesized
tgctgccaggaattccaggt

SEQ ID NO: 69801 - DNA, 20 bp, Artificial Sequence
  chemically synthesized
ctgccaggaattccaggttg

SEQ ID NO: 69802 - DNA, 20 bp, Artificial Sequence
  chemically synthesized
tgccaggaattccaggttgg

SEQ ID NO: 69803 - DNA, 20 bp, Artificial Sequence
  chemically synthesized
gccaggaattccaggttgga

SEQ ID NO: 69804 - DNA, 20 bp, Artificial Sequence
  chemically synthesized
ccaggaattccaggttggag

SEQ ID NO: 69805 - DNA, 20 bp, Artificial Sequence
  chemically synthesized
ggaattccaggttggagggg

SEQ ID NO: 69806 - DNA, 20 bp, Artificial Sequence
  chemically synthesized
gaggggcggcaacctcctgc

SEQ ID NO: 69807 - DNA, 20 bp, Artificial Sequence
  chemically synthesized
ggcaacctcctgccagcctt

SEQ ID NO: 69808 - DNA, 20 bp, Artificial Sequence
  chemically synthesized
gcaacctcctgccagccttc

SEQ ID NO: 69809 - DNA, 20 bp, Artificial Sequence
  chemically synthesized
ggccactctcctgtgcctgc

SEQ ID NO: 69810 - DNA, 20 bp, Artificial Sequence
  chemically synthesized
cactctcctgtgcctgccag

SEQ ID NO: 69811 - DNA, 20 bp, Artificial Sequence
  chemically synthesized
ctctcctgtgcctgccagaa

SEQ ID NO: 69812 - DNA, 20 bp, Artificial Sequence
  chemically synthesized
cctgtgcctgccagaagaga

SEQ ID NO: 69813 - DNA, 20 bp, Artificial Sequence
  chemically synthesized
tgtgcctgccagaagagaca

SEQ ID NO: 69814 - DNA, 20 bp, Artificial Sequence
  chemically synthesized
tgccagaagagacagagctt

SEQ ID NO: 69815 - DNA, 20 bp, Artificial Sequence
  chemically synthesized
gccagaagagacagagcttg

SEQ ID NO: 69816 - DNA, 20 bp, Artificial Sequence
  chemically synthesized
cagaagagacagagcttgag

SEQ ID NO: 69817 - DNA, 20 bp, Artificial Sequence
  chemically synthesized
gaagagacagagcttgagga

SEQ ID NO: 69818 - DNA, 20 bp, Artificial Sequence
  chemically synthesized
acagagcttgaggagagctt

SEQ ID NO: 69819 - DNA, 20 bp, Artificial Sequence
  chemically synthesized
cagagcttgaggagagcttg

SEQ ID NO: 69820 - DNA, 20 bp, Artificial Sequence
  chemically synthesized
gagcttgaggagagcttgag

SEQ ID NO: 69821 - DNA, 20 bp, Artificial Sequence
  chemically synthesized
gcttgaggagagcttgagga

SEQ ID NO: 69822 - DNA, 20 bp, Artificial Sequence
  chemically synthesized
tgaggagagcttgaggagag

SEQ ID NO: 69823 - DNA, 20 bp, Artificial Sequence
  chemically synthesized
gaggagagcttgaggagagc

SEQ ID NO: 69824 - DNA, 20 bp, Artificial Sequence
  chemically synthesized
agagcttgaggagagcagga

SEQ ID NO: 69825 - DNA, 20 bp, Artificial Sequence
  chemically synthesized
gagcttgaggagagcaggaa

SEQ ID NO: 69826 - DNA, 20 bp, Artificial Sequence
  chemically synthesized
cttgaggagagcaggaaagg

SEQ ID NO: 69827 - DNA, 20 bp, Artificial Sequence
  chemically synthesized
ttgaggagagcaggaaaggt

SEQ ID NO: 69828 - DNA, 20 bp, Artificial Sequence
  chemically synthesized
cattgctgctgctgctcact

SEQ ID NO: 69829 - DNA, 20 bp, Artificial Sequence
  chemically synthesized
ctgctgctcactcagttcca

SEQ ID NO: 69830 - DNA, 20 bp, Artificial Sequence
  chemically synthesized
tgctgctcactcagttccac

SEQ ID NO: 69831 - DNA, 20 bp, Artificial Sequence
  chemically synthesized
tgctcactcagttccacagg

SEQ ID NO: 69832 - DNA, 20 bp, Artificial Sequence
  chemically synthesized
gctcactcagttccacaggt

SEQ ID NO: 69833 - DNA, 20 bp, Artificial Sequence
  chemically synthesized
tcactcagttccacaggtgg

SEQ ID NO: 69834 - DNA, 20 bp, Artificial Sequence
  chemically synthesized
cactcagttccacaggtggg

SEQ ID NO: 69835 - DNA, 20 bp, Artificial Sequence
  chemically synthesized
actcagttccacaggtggga

SEQ ID NO: 69836 - DNA, 20 bp, Artificial Sequence
  chemically synthesized
agttccacaggtgggaggga

SEQ ID NO: 69837 - DNA, 20 bp, Artificial Sequence
  chemically synthesized
tccacaggtgggagggacag

SEQ ID NO: 69838 - DNA, 20 bp, Artificial Sequence
  chemically synthesized
ccacaggtgggagggacagc

SEQ ID NO: 69839 - DNA, 20 bp, Artificial Sequence
  chemically synthesized
cacaggtgggagggacagca

SEQ ID NO: 69840 - DNA, 20 bp, Artificial Sequence
  chemically synthesized
gtgggagggacagcagggct

SEQ ID NO: 69841 - DNA, 20 bp, Artificial Sequence
  chemically synthesized
gggagggacagcagggctta

SEQ ID NO: 69842 - DNA, 20 bp, Artificial Sequence
  chemically synthesized
agggacagcagggcttagag

SEQ ID NO: 69843 - DNA, 20 bp, Artificial Sequence
  chemically synthesized
gggacagcagggcttagagt

SEQ ID NO: 69844 - DNA, 20 bp, Artificial Sequence
  chemically synthesized
ggacagcagggcttagagtg

SEQ ID NO: 69845 - DNA, 20 bp, Artificial Sequence
  chemically synthesized
gacagcagggcttagagtgg

SEQ ID NO: 69846 - DNA, 20 bp, Artificial Sequence
  chemically synthesized
ttagagtgggggtcattgtg

SEQ ID NO: 69847 - DNA, 20 bp, Artificial Sequence
  chemically synthesized
agtgggggtcattgtgcaga

SEQ ID NO: 69848 - DNA, 20 bp, Artificial Sequence
  chemically synthesized
gtgggggtcattgtgcagat

SEQ ID NO: 69849 - DNA, 20 bp, Artificial Sequence
  chemically synthesized
attgtgcagatgggaaaaca

SEQ ID NO: 69850 - DNA, 20 bp, Artificial Sequence
  chemically synthesized
ttgtgcagatgggaaaacaa

SEQ ID NO: 69851 - DNA, 20 bp, Artificial Sequence
  chemically synthesized
cagatgggaaaacaaaggcc

SEQ ID NO: 69852 - DNA, 20 bp, Artificial Sequence
  chemically synthesized
gatgggaaaacaaaggccca

SEQ ID NO: 69853 - DNA, 20 bp, Artificial Sequence
  chemically synthesized
tgggaaaacaaaggcccaga

SEQ ID NO: 69854 - DNA, 20 bp, Artificial Sequence
  chemically synthesized
gggaaaacaaaggcccagag

SEQ ID NO: 69855 - DNA, 20 bp, Artificial Sequence
  chemically synthesized
ggaaaacaaaggcccagaga

SEQ ID NO: 69856 - DNA, 20 bp, Artificial Sequence
  chemically synthesized
gaaaacaaaggcccagagag

SEQ ID NO: 69857 - DNA, 20 bp, Artificial Sequence
  chemically synthesized
aacaaaggcccagagagggg

SEQ ID NO: 69858 - DNA, 20 bp, Artificial Sequence
  chemically synthesized
cagagaggggaagaaatgcc

SEQ ID NO: 69859 - DNA, 20 bp, Artificial Sequence
  chemically synthesized
agagaggggaagaaatgccc

SEQ ID NO: 69860 - DNA, 20 bp, Artificial Sequence
  chemically synthesized
agaggggaagaaatgcccag

SEQ ID NO: 69861 - DNA, 20 bp, Artificial Sequence
  chemically synthesized
agaaatgcccaggagctacc

SEQ ID NO: 69862 - DNA, 20 bp, Artificial Sequence
  chemically synthesized
gaaatgcccaggagctaccg

SEQ ID NO: 69863 - DNA, 20 bp, Artificial Sequence
  chemically synthesized
aaatgcccaggagctaccga

SEQ ID NO: 69864 - DNA, 20 bp, Artificial Sequence
  chemically synthesized
tgcccaggagctaccgaggg

SEQ ID NO: 69865 - DNA, 20 bp, Artificial Sequence
  chemically synthesized
gcccaggagctaccgagggc

SEQ ID NO: 69866 - DNA, 20 bp, Artificial Sequence
  chemically synthesized
agggcaggcgacctcaacca

SEQ ID NO: 69867 - DNA, 20 bp, Artificial Sequence
  chemically synthesized
aggcgacctcaaccacagcc

SEQ ID NO: 69868 - DNA, 20 bp, Artificial Sequence
  chemically synthesized
cctcaaccacagcccagtgc

SEQ ID NO: 69869 - DNA, 20 bp, Artificial Sequence
  chemically synthesized
tcaaccacagcccagtgctg

SEQ ID NO: 69870 - DNA, 20 bp, Artificial Sequence
  chemically synthesized
cagcccagtgctggagctgt

SEQ ID NO: 69871 - DNA, 20 bp, Artificial Sequence
  chemically synthesized
cccagtgctggagctgtgag

SEQ ID NO: 69872 - DNA, 20 bp, Artificial Sequence
  chemically synthesized
gctggagctgtgagtggatg

SEQ ID NO: 69873 - DNA, 20 bp, Artificial Sequence
  chemically synthesized
tggagctgtgagtggatgta

SEQ ID NO: 69874 - DNA, 20 bp, Artificial Sequence
  chemically synthesized
agctgtgagtggatgtagag

SEQ ID NO: 69875 - DNA, 20 bp, Artificial Sequence
  chemically synthesized
tgtgagtggatgtagagcag

SEQ ID NO: 69876 - DNA, 20 bp, Artificial Sequence
  chemically synthesized
agagcagcggaatatccatt

SEQ ID NO: 69877 - DNA, 20 bp, Artificial Sequence
  chemically synthesized
cagcggaatatccattcagc

SEQ ID NO: 69878 - DNA, 20 bp, Artificial Sequence
  chemically synthesized
gaatatccattcagccagct

SEQ ID NO: 69879 - DNA, 20 bp, Artificial Sequence
  chemically synthesized
aatatccattcagccagctc

SEQ ID NO: 69880 - DNA, 20 bp, Artificial Sequence
  chemically synthesized
atatccattcagccagctca

SEQ ID NO: 69881 - DNA, 20 bp, Artificial Sequence
  chemically synthesized
tatccattcagccagctcag

SEQ ID NO: 69882 - DNA, 20 bp, Artificial Sequence
  chemically synthesized
ccattcagccagctcagggg

SEQ ID NO: 69883 - DNA, 20 bp, Artificial Sequence
  chemically synthesized
cattcagccagctcagggga

SEQ ID NO: 69884 - DNA, 20 bp, Artificial Sequence
  chemically synthesized
cagccagctcaggggaagga

SEQ ID NO: 69885 - DNA, 20 bp, Artificial Sequence
  chemically synthesized
agccagctcaggggaaggac

SEQ ID NO: 69886 - DNA, 20 bp, Artificial Sequence
  chemically synthesized
gccagctcaggggaaggaca

SEQ ID NO: 69887 - DNA, 20 bp, Artificial Sequence
  chemically synthesized
ccagctcaggggaaggacag

SEQ ID NO: 69888 - DNA, 20 bp, Artificial Sequence
  chemically synthesized
ggggaaggacaggggccctg

SEQ ID NO: 69889 - DNA, 20 bp, Artificial Sequence
  chemically synthesized
aaggacaggggccctgaagc

SEQ ID NO: 69890 - DNA, 20 bp, Artificial Sequence
  chemically synthesized
aggacaggggccctgaagcc

SEQ ID NO: 69891 - DNA, 20 bp, Artificial Sequence
  chemically synthesized
ggacaggggccctgaagcca

SEQ ID NO: 69892 - DNA, 20 bp, Artificial Sequence
  chemically synthesized
gacaggggccctgaagccag

SEQ ID NO: 69893 - DNA, 20 bp, Artificial Sequence
  chemically synthesized
ggggccctgaagccagggga

SEQ ID NO: 69894 - DNA, 20 bp, Artificial Sequence
  chemically synthesized
ggccctgaagccaggggatg

SEQ ID NO: 69895 - DNA, 20 bp, Artificial Sequence
  chemically synthesized
gaagccaggggatggagctg

SEQ ID NO: 69896 - DNA, 20 bp, Artificial Sequence
  chemically synthesized
aagccaggggatggagctgc

SEQ ID NO: 69897 - DNA, 20 bp, Artificial Sequence
  chemically synthesized
agccaggggatggagctgca

SEQ ID NO: 69898 - DNA, 20 bp, Artificial Sequence
  chemically synthesized
caggggatggagctgcaggg

SEQ ID NO: 69899 - DNA, 20 bp, Artificial Sequence
  chemically synthesized
aggggatggagctgcaggga

SEQ ID NO: 69900 - DNA, 20 bp, Artificial Sequence
  chemically synthesized
ggggatggagctgcagggaa

SEQ ID NO: 69901 - DNA, 20 bp, Artificial Sequence
  chemically synthesized
ggatggagctgcagggaagg

SEQ ID NO: 69902 - DNA, 20 bp, Artificial Sequence
  chemically synthesized
gagctgcagggaagggagct

SEQ ID NO: 69903 - DNA, 20 bp, Artificial Sequence
  chemically synthesized
gctgcagggaagggagctca

SEQ ID NO: 69904 - DNA, 20 bp, Artificial Sequence
  chemically synthesized
tgcagggaagggagctcaga

SEQ ID NO: 69905 - DNA, 20 bp, Artificial Sequence
  chemically synthesized
agggaagggagctcagagag

SEQ ID NO: 69906 - DNA, 20 bp, Artificial Sequence
  chemically synthesized
gggaagggagctcagagaga

SEQ ID NO: 69907 - DNA, 20 bp, Artificial Sequence
  chemically synthesized
ggaagggagctcagagagaa

SEQ ID NO: 69908 - DNA, 20 bp, Artificial Sequence
  chemically synthesized
gaagggagctcagagagaag

SEQ ID NO: 69909 - DNA, 20 bp, Artificial Sequence
  chemically synthesized
agggagctcagagagaaggg

SEQ ID NO: 69910 - DNA, 20 bp, Artificial Sequence
  chemically synthesized
gggagctcagagagaagggg

SEQ ID NO: 69911 - DNA, 20 bp, Artificial Sequence
  chemically synthesized
ggagctcagagagaagggga

SEQ ID NO: 69912 - DNA, 20 bp, Artificial Sequence
  chemically synthesized
gagctcagagagaaggggag

SEQ ID NO: 69913 - DNA, 20 bp, Artificial Sequence
  chemically synthesized
gctcagagagaaggggaggg

SEQ ID NO: 69914 - DNA, 20 bp, Artificial Sequence
  chemically synthesized
agagaaggggaggggagtct

SEQ ID NO: 69915 - DNA, 20 bp, Artificial Sequence
  chemically synthesized
aggggaggggagtctgagct

SEQ ID NO: 69916 - DNA, 20 bp, Artificial Sequence
  chemically synthesized
ctcagtttcccgctgcctga

SEQ ID NO: 69917 - DNA, 20 bp, Artificial Sequence
  chemically synthesized
tcagtttcccgctgcctgaa

SEQ ID NO: 69918 - DNA, 20 bp, Artificial Sequence
  chemically synthesized
agtttcccgctgcctgaaag

SEQ ID NO: 69919 - DNA, 20 bp, Artificial Sequence
  chemically synthesized
gtttcccgctgcctgaaagg

SEQ ID NO: 69920 - DNA, 20 bp, Artificial Sequence
  chemically synthesized
tttcccgctgcctgaaagga

SEQ ID NO: 69921 - DNA, 20 bp, Artificial Sequence
  chemically synthesized
cccgctgcctgaaaggaggg

SEQ ID NO: 69922 - DNA, 20 bp, Artificial Sequence
  chemically synthesized
ggtggtacctactcccttca

SEQ ID NO: 69923 - DNA, 20 bp, Artificial Sequence
  chemically synthesized
gtggtacctactcccttcac

SEQ ID NO: 69924 - DNA, 20 bp, Artificial Sequence
  chemically synthesized
tggtacctactcccttcaca

SEQ ID NO: 69925 - DNA, 20 bp, Artificial Sequence
  chemically synthesized
ccttcacagggtaactgaat

SEQ ID NO: 69926 - DNA, 20 bp, Artificial Sequence
  chemically synthesized
ttcacagggtaactgaatga

SEQ ID NO: 69927 - DNA, 20 bp, Artificial Sequence
  chemically synthesized
taactgaatgagagactgcc

SEQ ID NO: 69928 - DNA, 20 bp, Artificial Sequence
  chemically synthesized
actgaatgagagactgcctg

SEQ ID NO: 69929 - DNA, 20 bp, Artificial Sequence
  chemically synthesized
ctgaatgagagactgcctgg

SEQ ID NO: 69930 - DNA, 20 bp, Artificial Sequence
  chemically synthesized
atgagagactgcctggagga

SEQ ID NO: 69931 - DNA, 20 bp, Artificial Sequence
  chemically synthesized
tgcctggaggaaagctcttc

SEQ ID NO: 69932 - DNA, 20 bp, Artificial Sequence
  chemically synthesized
ggaggaaagctcttcaagtg

SEQ ID NO: 69933 - DNA, 20 bp, Artificial Sequence
  chemically synthesized
aagtgtggcccaccccaccc

SEQ ID NO: 69934 - DNA, 20 bp, Artificial Sequence
  chemically synthesized
ccaccccaccccagtgacac

SEQ ID NO: 69935 - DNA, 20 bp, Artificial Sequence
  chemically synthesized
agtgacaccagcccctgaca

SEQ ID NO: 69936 - DNA, 20 bp, Artificial Sequence
  chemically synthesized
gtgacaccagcccctgacac

SEQ ID NO: 69937 - DNA, 20 bp, Artificial Sequence
  chemically synthesized
tgacaccagcccctgacacg

SEQ ID NO: 69938 - DNA, 20 bp, Artificial Sequence
  chemically synthesized
gacaccagcccctgacacgg

SEQ ID NO: 69939 - DNA, 20 bp, Artificial Sequence
  chemically synthesized
caccagcccctgacacgggg

SEQ ID NO: 69940 - DNA, 20 bp, Artificial Sequence
  chemically synthesized
accagcccctgacacggggg

SEQ ID NO: 69941 - DNA, 20 bp, Artificial Sequence
  chemically synthesized
ccagcccctgacacggggga

SEQ ID NO: 69942 - DNA, 20 bp, Artificial Sequence
  chemically synthesized
agcccctgacacgggggagg

SEQ ID NO: 69943 - DNA, 20 bp, Artificial Sequence
  chemically synthesized
gcccctgacacgggggaggg

SEQ ID NO: 69944 - DNA, 20 bp, Artificial Sequence
  chemically synthesized
cccctgacacgggggaggga

SEQ ID NO: 69945 - DNA, 20 bp, Artificial Sequence
  chemically synthesized
ctgacacgggggagggaggg

SEQ ID NO: 69946 - DNA, 20 bp, Artificial Sequence
  chemically synthesized
cgggggagggagggcagcat

SEQ ID NO: 69947 - DNA, 20 bp, Artificial Sequence
  chemically synthesized
gggggagggagggcagcatc

SEQ ID NO: 69948 - DNA, 20 bp, Artificial Sequence
  chemically synthesized
gggagggagggcagcatcag

SEQ ID NO: 69949 - DNA, 20 bp, Artificial Sequence
  chemically synthesized
ggagggagggcagcatcagg

SEQ ID NO: 69950 - DNA, 20 bp, Artificial Sequence
  chemically synthesized
gagggagggcagcatcagga

SEQ ID NO: 69951 - DNA, 20 bp, Artificial Sequence
  chemically synthesized
agggagggcagcatcaggag

SEQ ID NO: 69952 - DNA, 20 bp, Artificial Sequence
  chemically synthesized
cagcatcaggaggggctttc

SEQ ID NO: 69953 - DNA, 20 bp, Artificial Sequence
  chemically synthesized
agcatcaggaggggctttct

SEQ ID NO: 69954 - DNA, 20 bp, Artificial Sequence
  chemically synthesized
aggggctttctgggcacacc

SEQ ID NO: 69955 - DNA, 20 bp, Artificial Sequence
  chemically synthesized
cacacccagtacccgtctct

SEQ ID NO: 69956 - DNA, 20 bp, Artificial Sequence
  chemically synthesized
ctgttgcattttaatcctca

SEQ ID NO: 69957 - DNA, 20 bp, Artificial Sequence
  chemically synthesized
ttgcattttaatcctcacag

SEQ ID NO: 69958 - DNA, 20 bp, Artificial Sequence
  chemically synthesized
aatcctcacagcagctcaac

SEQ ID NO: 69959 - DNA, 20 bp, Artificial Sequence
  chemically synthesized
atcctcacagcagctcaaca

SEQ ID NO: 69960 - DNA, 20 bp, Artificial Sequence
  chemically synthesized
ccgtcaccatccccatttta

SEQ ID NO: 69961 - DNA, 20 bp, Artificial Sequence
  chemically synthesized
caccatccccattttacaga

SEQ ID NO: 69962 - DNA, 20 bp, Artificial Sequence
  chemically synthesized
accatccccattttacagat

SEQ ID NO: 69963 - DNA, 20 bp, Artificial Sequence
  chemically synthesized
ccatccccattttacagata

SEQ ID NO: 69964 - DNA, 20 bp, Artificial Sequence
  chemically synthesized
attttacagatagggaaatt

SEQ ID NO: 69965 - DNA, 20 bp, Artificial Sequence
  chemically synthesized
ttttacagatagggaaattg

SEQ ID NO: 69966 - DNA, 20 bp, Artificial Sequence
  chemically synthesized
cagatagggaaattgaggct

SEQ ID NO: 69967 - DNA, 20 bp, Artificial Sequence
  chemically synthesized
gatagggaaattgaggctcg

SEQ ID NO: 69968 - DNA, 20 bp, Artificial Sequence
  chemically synthesized
agggaaattgaggctcggag

SEQ ID NO: 69969 - DNA, 20 bp, Artificial Sequence
  chemically synthesized
agcggttaaacaactcacct

SEQ ID NO: 69970 - DNA, 20 bp, Artificial Sequence
  chemically synthesized
gcggttaaacaactcacctg

SEQ ID NO: 69971 - DNA, 20 bp, Artificial Sequence
  chemically synthesized
acaactcacctgaggcctca

SEQ ID NO: 69972 - DNA, 20 bp, Artificial Sequence
  chemically synthesized
ctcacctgaggcctcacagc

SEQ ID NO: 69973 - DNA, 20 bp, Artificial Sequence
  chemically synthesized
cctgaggcctcacagccagt

SEQ ID NO: 69974 - DNA, 20 bp, Artificial Sequence
  chemically synthesized
gaggcctcacagccagtaag

SEQ ID NO: 69975 - DNA, 20 bp, Artificial Sequence
  chemically synthesized
aggcctcacagccagtaagt

SEQ ID NO: 69976 - DNA, 20 bp, Artificial Sequence
  chemically synthesized
cagccagtaagtgggttccc

SEQ ID NO: 69977 - DNA, 20 bp, Artificial Sequence
  chemically synthesized
cctggtctgaatgtgtgtgc

SEQ ID NO: 69978 - DNA, 20 bp, Artificial Sequence
  chemically synthesized
tggtctgaatgtgtgtgctg

SEQ ID NO: 69979 - DNA, 20 bp, Artificial Sequence
  chemically synthesized
ggtctgaatgtgtgtgctgg

SEQ ID NO: 69980 - DNA, 20 bp, Artificial Sequence
  chemically synthesized
gtgtgtgctggaggatcctg

SEQ ID NO: 69981 - DNA, 20 bp, Artificial Sequence
  chemically synthesized
tgtgtgctggaggatcctgt

SEQ ID NO: 69982 - DNA, 20 bp, Artificial Sequence
  chemically synthesized
gatcctgtgggtcactcgcc

SEQ ID NO: 69983 - DNA, 20 bp, Artificial Sequence
  chemically synthesized
cctgtgggtcactcgcctgg

SEQ ID NO: 69984 - DNA, 20 bp, Artificial Sequence
  chemically synthesized
tgtgggtcactcgcctggta

SEQ ID NO: 69985 - DNA, 20 bp, Artificial Sequence
  chemically synthesized
cactcgcctggtagagcccc

SEQ ID NO: 69986 - DNA, 20 bp, Artificial Sequence
  chemically synthesized
actcgcctggtagagcccca

SEQ ID NO: 69987 - DNA, 20 bp, Artificial Sequence
  chemically synthesized
cgcctggtagagccccaagg

SEQ ID NO: 69988 - DNA, 20 bp, Artificial Sequence
  chemically synthesized
cctggtagagccccaaggtg

SEQ ID NO: 69989 - DNA, 20 bp, Artificial Sequence
  chemically synthesized
ctggtagagccccaaggtgg

SEQ ID NO: 69990 - DNA, 20 bp, Artificial Sequence
  chemically synthesized
ccccaaggtggaggcataaa

SEQ ID NO: 69991 - DNA, 20 bp, Artificial Sequence
  chemically synthesized
cccaaggtggaggcataaat

SEQ ID NO: 69992 - DNA, 20 bp, Artificial Sequence
  chemically synthesized
ggtggaggcataaatgggac

SEQ ID NO: 69993 - DNA, 20 bp, Artificial Sequence
  chemically synthesized
taaatgggactggtgaatga

SEQ ID NO: 69994 - DNA, 20 bp, Artificial Sequence
  chemically synthesized
atgggactggtgaatgacag

SEQ ID NO: 69995 - DNA, 20 bp, Artificial Sequence
  chemically synthesized
tgggactggtgaatgacaga

SEQ ID NO: 69996 - DNA, 20 bp, Artificial Sequence
  chemically synthesized
gggactggtgaatgacagaa

SEQ ID NO: 69997 - DNA, 20 bp, Artificial Sequence
  chemically synthesized
ggactggtgaatgacagaag

SEQ ID NO: 69998 - DNA, 20 bp, Artificial Sequence
  chemically synthesized
cactcatccattcactctgc

SEQ ID NO: 69999 - DNA, 20 bp, Artificial Sequence
  chemically synthesized
attcactctgcaagtatcta

SEQ ID NO: 70000 - DNA, 20 bp, Artificial Sequence
  chemically synthesized
agtatctacggcacgtacgc

SEQ ID NO: 70001 - DNA, 20 bp, Artificial Sequence
  chemically synthesized
cggcacgtacgccagctccc

SEQ ID NO: 70002 - DNA, 20 bp, Artificial Sequence
  chemically synthesized
cacgtacgccagctcccaag

SEQ ID NO: 70003 - DNA, 20 bp, Artificial Sequence
  chemically synthesized
acgtacgccagctcccaagc

SEQ ID NO: 70004 - DNA, 20 bp, Artificial Sequence
  chemically synthesized
ccagctcccaagcaggtttg

SEQ ID NO: 70005 - DNA, 20 bp, Artificial Sequence
  chemically synthesized
cagctcccaagcaggtttgc

SEQ ID NO: 70006 - DNA, 20 bp, Artificial Sequence
  chemically synthesized
aagcaggtttgcgggttgca

SEQ ID NO: 70007 - DNA, 20 bp, Artificial Sequence
  chemically synthesized
caggtttgcgggttgcacag

SEQ ID NO: 70008 - DNA, 20 bp, Artificial Sequence
  chemically synthesized
aggtttgcgggttgcacagc

SEQ ID NO: 70009 - DNA, 20 bp, Artificial Sequence
  chemically synthesized
gcgggcgatgcaatctgatt

SEQ ID NO: 70010 - DNA, 20 bp, Artificial Sequence
  chemically synthesized
cgggcgatgcaatctgattt

SEQ ID NO: 70011 - DNA, 20 bp, Artificial Sequence
  chemically synthesized
caatctgatttaggctttta

SEQ ID NO: 70012 - DNA, 20 bp, Artificial Sequence
  chemically synthesized
aatctgatttaggcttttaa

SEQ ID NO: 70013 - DNA, 20 bp, Artificial Sequence
  chemically synthesized
atctgatttaggcttttaaa

SEQ ID NO: 70014 - DNA, 20 bp, Artificial Sequence
  chemically synthesized
cttttaaagggattgcaatc

SEQ ID NO: 70015 - DNA, 20 bp, Artificial Sequence
  chemically synthesized
ttaaagggattgcaatcaag

SEQ ID NO: 70016 - DNA, 20 bp, Artificial Sequence
  chemically synthesized
taaagggattgcaatcaagt

SEQ ID NO: 70017 - DNA, 20 bp, Artificial Sequence
  chemically synthesized
aaagggattgcaatcaagtg

SEQ ID NO: 70018 - DNA, 20 bp, Artificial Sequence
  chemically synthesized
gcaatcaagtggggccccac

SEQ ID NO: 70019 - DNA, 20 bp, Artificial Sequence
  chemically synthesized
cctcccctcccctccacccc

SEQ ID NO: 70020 - DNA, 20 bp, Artificial Sequence
  chemically synthesized
cccctcccctccacccccag

SEQ ID NO: 70021 - DNA, 20 bp, Artificial Sequence
  chemically synthesized
tccacccccagcagtctcca

SEQ ID NO: 70022 - DNA, 20 bp, Artificial Sequence
  chemically synthesized
ccacccccagcagtctccaa

SEQ ID NO: 70023 - DNA, 20 bp, Artificial Sequence
  chemically synthesized
ccaaaggcctccaacaaccc

SEQ ID NO: 70024 - DNA, 20 bp, Artificial Sequence
  chemically synthesized
aaaggcctccaacaacccca

SEQ ID NO: 70025 - DNA, 20 bp, Artificial Sequence
  chemically synthesized
ggcctccaacaaccccagag

SEQ ID NO: 70026 - DNA, 20 bp, Artificial Sequence
  chemically synthesized
gcctccaacaaccccagagt

SEQ ID NO: 70027 - DNA, 20 bp, Artificial Sequence
  chemically synthesized
cctccaacaaccccagagtg

SEQ ID NO: 70028 - DNA, 20 bp, Artificial Sequence
  chemically synthesized
ctccaacaaccccagagtgg

SEQ ID NO: 70029 - DNA, 20 bp, Artificial Sequence
  chemically synthesized
gagtgggggccatgtatcca

SEQ ID NO: 70030 - DNA, 20 bp, Artificial Sequence
  chemically synthesized
catgtatccaaagaaactcc

SEQ ID NO: 70031 - DNA, 20 bp, Artificial Sequence
  chemically synthesized
aagaaactccaagctgtata

SEQ ID NO: 70032 - DNA, 20 bp, Artificial Sequence
  chemically synthesized
aagctgtatacggatcacac

SEQ ID NO: 70033 - DNA, 20 bp, Artificial Sequence
  chemically synthesized
tacggatcacactggttttc

SEQ ID NO: 70034 - DNA, 20 bp, Artificial Sequence
  chemically synthesized
acggatcacactggttttcc

SEQ ID NO: 70035 - DNA, 20 bp, Artificial Sequence
  chemically synthesized
ggatcacactggttttccag

SEQ ID NO: 70036 - DNA, 20 bp, Artificial Sequence
  chemically synthesized
tggttttccaggagcaaaaa

SEQ ID NO: 70037 - DNA, 20 bp, Artificial Sequence
  chemically synthesized
tccaggagcaaaaacagaaa

SEQ ID NO: 70038 - DNA, 20 bp, Artificial Sequence
  chemically synthesized
ccaggagcaaaaacagaaac

SEQ ID NO: 70039 - DNA, 20 bp, Artificial Sequence
  chemically synthesized
gcaaaaacagaaacaggcct

SEQ ID NO: 70040 - DNA, 20 bp, Artificial Sequence
  chemically synthesized
caaaaacagaaacaggcctg

SEQ ID NO: 70041 - DNA, 20 bp, Artificial Sequence
  chemically synthesized
aacagaaacaggcctgaggc

SEQ ID NO: 70042 - DNA, 20 bp, Artificial Sequence
  chemically synthesized
attgaacctcctcctgctct

SEQ ID NO: 70043 - DNA, 20 bp, Artificial Sequence
  chemically synthesized
gaacctcctcctgctctgag

SEQ ID NO: 70044 - DNA, 20 bp, Artificial Sequence
  chemically synthesized
tcctcctgctctgagcagcc

SEQ ID NO: 70045 - DNA, 20 bp, Artificial Sequence
  chemically synthesized
cctcctgctctgagcagcct

SEQ ID NO: 70046 - DNA, 20 bp, Artificial Sequence
  chemically synthesized
ctcctgctctgagcagcctg

SEQ ID NO: 70047 - DNA, 20 bp, Artificial Sequence
  chemically synthesized
tcctgctctgagcagcctgg

SEQ ID NO: 70048 - DNA, 20 bp, Artificial Sequence
  chemically synthesized
cctgctctgagcagcctggg

SEQ ID NO: 70049 - DNA, 20 bp, Artificial Sequence
  chemically synthesized
gctctgagcagcctgggggg

SEQ ID NO: 70050 - DNA, 20 bp, Artificial Sequence
  chemically synthesized
agcagcctggggggcagact

SEQ ID NO: 70051 - DNA, 20 bp, Artificial Sequence
  chemically synthesized
agcctggggggcagactaag

SEQ ID NO: 70052 - DNA, 20 bp, Artificial Sequence
  chemically synthesized
cctggggggcagactaagca

SEQ ID NO: 70053 - DNA, 20 bp, Artificial Sequence
  chemically synthesized
ctggggggcagactaagcag

SEQ ID NO: 70054 - DNA, 20 bp, Artificial Sequence
  chemically synthesized
tggggggcagactaagcaga

SEQ ID NO: 70055 - DNA, 20 bp, Artificial Sequence
  chemically synthesized
agactaagcagagggctgtg

SEQ ID NO: 70056 - DNA, 20 bp, Artificial Sequence
  chemically synthesized
gggctgtgcagacccacata

SEQ ID NO: 70057 - DNA, 20 bp, Artificial Sequence
  chemically synthesized
gctgtgcagacccacataaa

SEQ ID NO: 70058 - DNA, 20 bp, Artificial Sequence
  chemically synthesized
ataaagagcctactgtgtgc

SEQ ID NO: 70059 - DNA, 20 bp, Artificial Sequence
  chemically synthesized
taaagagcctactgtgtgcc

SEQ ID NO: 70060 - DNA, 20 bp, Artificial Sequence
  chemically synthesized
gtgtgccaggcacttcaccc

SEQ ID NO: 70061 - DNA, 20 bp, Artificial Sequence
  chemically synthesized
tgtgccaggcacttcacccg

SEQ ID NO: 70062 - DNA, 20 bp, Artificial Sequence
  chemically synthesized
cttcacccgaggcacttcac

SEQ ID NO: 70063 - DNA, 20 bp, Artificial Sequence
  chemically synthesized
aggcacttcacaagcatgct

SEQ ID NO: 70064 - DNA, 20 bp, Artificial Sequence
  chemically synthesized
ggcacttcacaagcatgctt

SEQ ID NO: 70065 - DNA, 20 bp, Artificial Sequence
  chemically synthesized
gaatgaaacttccaactctt

SEQ ID NO: 70066 - DNA, 20 bp, Artificial Sequence
  chemically synthesized
aatgaaacttccaactcttt

SEQ ID NO: 70067 - DNA, 20 bp, Artificial Sequence
  chemically synthesized
acttccaactctttgggatg

SEQ ID NO: 70068 - DNA, 20 bp, Artificial Sequence
  chemically synthesized
cttccaactctttgggatgc

SEQ ID NO: 70069 - DNA, 20 bp, Artificial Sequence
  chemically synthesized
tctttgggatgcaggtgaaa

SEQ ID NO: 70070 - DNA, 20 bp, Artificial Sequence
  chemically synthesized
gatgcaggtgaaacagttcc

SEQ ID NO: 70071 - DNA, 20 bp, Artificial Sequence
  chemically synthesized
aggtgaaacagttcctggtt

SEQ ID NO: 70072 - DNA, 20 bp, Artificial Sequence
  chemically synthesized
gtgaaacagttcctggttca

SEQ ID NO: 70073 - DNA, 20 bp, Artificial Sequence
  chemically synthesized
gaaacagttcctggttcaga

SEQ ID NO: 70074 - DNA, 20 bp, Artificial Sequence
  chemically synthesized
aaacagttcctggttcagag

SEQ ID NO: 70075 - DNA, 20 bp, Artificial Sequence
  chemically synthesized
gttcctggttcagagaggtg

SEQ ID NO: 70076 - DNA, 20 bp, Artificial Sequence
  chemically synthesized
cctggttcagagaggtgaag

SEQ ID NO: 70077 - DNA, 20 bp, Artificial Sequence
  chemically synthesized
agaggtgaagcggcctgcct

SEQ ID NO: 70078 - DNA, 20 bp, Artificial Sequence
  chemically synthesized
gaggtgaagcggcctgcctg

SEQ ID NO: 70079 - DNA, 20 bp, Artificial Sequence
  chemically synthesized
gtgaagcggcctgcctgagg

SEQ ID NO: 70080 - DNA, 20 bp, Artificial Sequence
  chemically synthesized
gcggcctgcctgaggcagca

SEQ ID NO: 70081 - DNA, 20 bp, Artificial Sequence
  chemically synthesized
ggcagcacagctcttcttta

SEQ ID NO: 70082 - DNA, 20 bp, Artificial Sequence
  chemically synthesized
cccacctctaccctgtctca

SEQ ID NO: 70083 - DNA, 20 bp, Artificial Sequence
  chemically synthesized
tgtctcacggccccccatgc

SEQ ID NO: 70084 - DNA, 20 bp, Artificial Sequence
  chemically synthesized
ggccccccatgccagcctga

SEQ ID NO: 70085 - DNA, 20 bp, Artificial Sequence
  chemically synthesized
cctgacggttgtgtctgcct

SEQ ID NO: 70086 - DNA, 20 bp, Artificial Sequence
  chemically synthesized
gtcatgctccatttttccat

SEQ ID NO: 70087 - DNA, 20 bp, Artificial Sequence
  chemically synthesized
tcatgctccatttttccatc

SEQ ID NO: 70088 - DNA, 20 bp, Artificial Sequence
  chemically synthesized
atttttccatcgggaccatc

SEQ ID NO: 70089 - DNA, 20 bp, Artificial Sequence
  chemically synthesized
ttttccatcgggaccatcaa

SEQ ID NO: 70090 - DNA, 20 bp, Artificial Sequence
  chemically synthesized
tttccatcgggaccatcaag

SEQ ID NO: 70091 - DNA, 20 bp, Artificial Sequence
  chemically synthesized
ttccatcgggaccatcaaga

SEQ ID NO: 70092 - DNA, 20 bp, Artificial Sequence
  chemically synthesized
tcaagagggtgtttgtgtct

SEQ ID NO: 70093 - DNA, 20 bp, Artificial Sequence
  chemically synthesized
caagagggtgtttgtgtcta

SEQ ID NO: 70094 - DNA, 20 bp, Artificial Sequence
  chemically synthesized
tgtttgtgtctaaggctgac

SEQ ID NO: 70095 - DNA, 20 bp, Artificial Sequence
  chemically synthesized
gtttgtgtctaaggctgact

SEQ ID NO: 70096 - DNA, 20 bp, Artificial Sequence
  chemically synthesized
taaggctgactgggtaactt

SEQ ID NO: 70097 - DNA, 20 bp, Artificial Sequence
  chemically synthesized
ctgactgggtaactttggat

SEQ ID NO: 70098 - DNA, 20 bp, Artificial Sequence
  chemically synthesized
actgggtaactttggatgag

SEQ ID NO: 70099 - DNA, 20 bp, Artificial Sequence
  chemically synthesized
atgagcggtctctccgctct

SEQ ID NO: 70100 - DNA, 20 bp, Artificial Sequence
  chemically synthesized
ctgtttcctcatctgtcaaa

SEQ ID NO: 70101 - DNA, 20 bp, Artificial Sequence
  chemically synthesized
tgtttcctcatctgtcaaat

SEQ ID NO: 70102 - DNA, 20 bp, Artificial Sequence
  chemically synthesized
tctaacccactctgatctcc

SEQ ID NO: 70103 - DNA, 20 bp, Artificial Sequence
  chemically synthesized
ctaacccactctgatctccc

SEQ ID NO: 70104 - DNA, 20 bp, Artificial Sequence
  chemically synthesized
taacccactctgatctccca

SEQ ID NO: 70105 - DNA, 20 bp, Artificial Sequence
  chemically synthesized
cccactctgatctcccaggg

SEQ ID NO: 70106 - DNA, 20 bp, Artificial Sequence
  chemically synthesized
actctgatctcccagggcgg

SEQ ID NO: 70107 - DNA, 20 bp, Artificial Sequence
  chemically synthesized
tgatctcccagggcggcagt

SEQ ID NO: 70108 - DNA, 20 bp, Artificial Sequence
  chemically synthesized
ccagggcggcagtaagtctt

SEQ ID NO: 70109 - DNA, 20 bp, Artificial Sequence
  chemically synthesized
cggcagtaagtcttcagcat

SEQ ID NO: 70110 - DNA, 20 bp, Artificial Sequence
  chemically synthesized
ggcagtaagtcttcagcatc

SEQ ID NO: 70111 - DNA, 20 bp, Artificial Sequence
  chemically synthesized
gtcttcagcatcaggcattt

SEQ ID NO: 70112 - DNA, 20 bp, Artificial Sequence
  chemically synthesized
tcttcagcatcaggcatttt

SEQ ID NO: 70113 - DNA, 20 bp, Artificial Sequence
  chemically synthesized
cttcagcatcaggcattttg

SEQ ID NO: 70114 - DNA, 20 bp, Artificial Sequence
  chemically synthesized
tcaggcattttggggtgact

SEQ ID NO: 70115 - DNA, 20 bp, Artificial Sequence
  chemically synthesized
ttttggggtgactcagtaaa

SEQ ID NO: 70116 - DNA, 20 bp, Artificial Sequence
  chemically synthesized
tggggtgactcagtaaatgg

SEQ ID NO: 70117 - DNA, 20 bp, Artificial Sequence
  chemically synthesized
taaatggtagatcttgctac

SEQ ID NO: 70118 - DNA, 20 bp, Artificial Sequence
  chemically synthesized
atggtagatcttgctaccag

SEQ ID NO: 70119 - DNA, 20 bp, Artificial Sequence
  chemically synthesized
agatcttgctaccagtggaa

SEQ ID NO: 70120 - DNA, 20 bp, Artificial Sequence
  chemically synthesized
ctaccagtggaacagccact

SEQ ID NO: 70121 - DNA, 20 bp, Artificial Sequence
  chemically synthesized
taccagtggaacagccacta

SEQ ID NO: 70122 - DNA, 20 bp, Artificial Sequence
  chemically synthesized
aacagccactaaggattctg

SEQ ID NO: 70123 - DNA, 20 bp, Artificial Sequence
  chemically synthesized
gccactaaggattctgcagt

SEQ ID NO: 70124 - DNA, 20 bp, Artificial Sequence
  chemically synthesized
cactaaggattctgcagtga

SEQ ID NO: 70125 - DNA, 20 bp, Artificial Sequence
  chemically synthesized
taaggattctgcagtgagag

SEQ ID NO: 70126 - DNA, 20 bp, Artificial Sequence
  chemically synthesized
aggattctgcagtgagagca

SEQ ID NO: 70127 - DNA, 20 bp, Artificial Sequence
  chemically synthesized
ggattctgcagtgagagcag

SEQ ID NO: 70128 - DNA, 20 bp, Artificial Sequence
  chemically synthesized
gattctgcagtgagagcaga

SEQ ID NO: 70129 - DNA, 20 bp, Artificial Sequence
  chemically synthesized
ctgcagtgagagcagagggc

SEQ ID NO: 70130 - DNA, 20 bp, Artificial Sequence
  chemically synthesized
gtgagagcagagggccagct

SEQ ID NO: 70131 - DNA, 20 bp, Artificial Sequence
  chemically synthesized
agagcagagggccagctaag

SEQ ID NO: 70132 - DNA, 20 bp, Artificial Sequence
  chemically synthesized
ccagctaagtggtactctcc

SEQ ID NO: 70133 - DNA, 20 bp, Artificial Sequence
  chemically synthesized
agctaagtggtactctccca

SEQ ID NO: 70134 - DNA, 20 bp, Artificial Sequence
  chemically synthesized
tcacgccaccccctccacct

SEQ ID NO: 70135 - DNA, 20 bp, Artificial Sequence
  chemically synthesized
caccccctccaccttggaca

SEQ ID NO: 70136 - DNA, 20 bp, Artificial Sequence
  chemically synthesized
accccctccaccttggacac

SEQ ID NO: 70137 - DNA, 20 bp, Artificial Sequence
  chemically synthesized
accttggacacaggacgctg

SEQ ID NO: 70138 - DNA, 20 bp, Artificial Sequence
  chemically synthesized
cacaggacgctgtggtttct

SEQ ID NO: 70139 - DNA, 20 bp, Artificial Sequence
  chemically synthesized
ggacgctgtggtttctgagc

SEQ ID NO: 70140 - DNA, 20 bp, Artificial Sequence
  chemically synthesized
gacgctgtggtttctgagcc

SEQ ID NO: 70141 - DNA, 20 bp, Artificial Sequence
  chemically synthesized
ccaggtacaatgactccttt

SEQ ID NO: 70142 - DNA, 20 bp, Artificial Sequence
  chemically synthesized
gtacaatgactcctttcggt

SEQ ID NO: 70143 - DNA, 20 bp, Artificial Sequence
  chemically synthesized
atgactcctttcggtaagtg

SEQ ID NO: 70144 - DNA, 20 bp, Artificial Sequence
  chemically synthesized
actcctttcggtaagtgcag

SEQ ID NO: 70145 - DNA, 20 bp, Artificial Sequence
  chemically synthesized
cctttcggtaagtgcagtgg

SEQ ID NO: 70146 - DNA, 20 bp, Artificial Sequence
  chemically synthesized
agtggaagctgtacactgcc

SEQ ID NO: 70147 - DNA, 20 bp, Artificial Sequence
  chemically synthesized
gtggaagctgtacactgccc

SEQ ID NO: 70148 - DNA, 20 bp, Artificial Sequence
  chemically synthesized
agctgtacactgcccaggca

SEQ ID NO: 70149 - DNA, 20 bp, Artificial Sequence
  chemically synthesized
cactgcccaggcaaagcgtc

SEQ ID NO: 70150 - DNA, 20 bp, Artificial Sequence
  chemically synthesized
actgcccaggcaaagcgtcc

SEQ ID NO: 70151 - DNA, 20 bp, Artificial Sequence
  chemically synthesized
gcccaggcaaagcgtccggg

SEQ ID NO: 70152 - DNA, 20 bp, Artificial Sequence
  chemically synthesized
ggcaaagcgtccgggcagcg

SEQ ID NO: 70153 - DNA, 20 bp, Artificial Sequence
  chemically synthesized
gcaaagcgtccgggcagcgt

SEQ ID NO: 70154 - DNA, 20 bp, Artificial Sequence
  chemically synthesized
aagcgtccgggcagcgtagg

SEQ ID NO: 70155 - DNA, 20 bp, Artificial Sequence
  chemically synthesized
agcgtccgggcagcgtaggc

SEQ ID NO: 70156 - DNA, 20 bp, Artificial Sequence
  chemically synthesized
ggcagcgtaggcgggcgact

SEQ ID NO: 70157 - DNA, 20 bp, Artificial Sequence
  chemically synthesized
taggcgggcgactcagatcc

SEQ ID NO: 70158 - DNA, 20 bp, Artificial Sequence
  chemically synthesized
cgggcgactcagatcccagc

SEQ ID NO: 70159 - DNA, 20 bp, Artificial Sequence
  chemically synthesized
gcgactcagatcccagccag

SEQ ID NO: 70160 - DNA, 20 bp, Artificial Sequence
  chemically synthesized
cagatcccagccagtggact

SEQ ID NO: 70161 - DNA, 20 bp, Artificial Sequence
  chemically synthesized
ctgtttgctcctccgataac

SEQ ID NO: 70162 - DNA, 20 bp, Artificial Sequence
  chemically synthesized
tgtttgctcctccgataact

SEQ ID NO: 70163 - DNA, 20 bp, Artificial Sequence
  chemically synthesized
gtttgctcctccgataactg

SEQ ID NO: 70164 - DNA, 20 bp, Artificial Sequence
  chemically synthesized
tccgataactggggtgacct

SEQ ID NO: 70165 - DNA, 20 bp, Artificial Sequence
  chemically synthesized
tgaccttggttaatattcac

SEQ ID NO: 70166 - DNA, 20 bp, Artificial Sequence
  chemically synthesized
ccttggttaatattcaccag

SEQ ID NO: 70167 - DNA, 20 bp, Artificial Sequence
  chemically synthesized
agcctcccccgttgcccctc

SEQ ID NO: 70168 - DNA, 20 bp, Artificial Sequence
  chemically synthesized
ctggatccactgcttaaata

SEQ ID NO: 70169 - DNA, 20 bp, Artificial Sequence
  chemically synthesized
tccactgcttaaatacggac

SEQ ID NO: 70170 - DNA, 20 bp, Artificial Sequence
  chemically synthesized
ccactgcttaaatacggacg

SEQ ID NO: 70171 - DNA, 20 bp, Artificial Sequence
  chemically synthesized
tgcttaaatacggacgagga

SEQ ID NO: 70172 - DNA, 20 bp, Artificial Sequence
  chemically synthesized
gcttaaatacggacgaggac

SEQ ID NO: 70173 - DNA, 20 bp, Artificial Sequence
  chemically synthesized
cttaaatacggacgaggaca

SEQ ID NO: 70174 - DNA, 20 bp, Artificial Sequence
  chemically synthesized
aggacagggccctgtctcct

SEQ ID NO: 70175 - DNA, 20 bp, Artificial Sequence
  chemically synthesized
gggccctgtctcctcagctt

SEQ ID NO: 70176 - DNA, 20 bp, Artificial Sequence
  chemically synthesized
ggccctgtctcctcagcttc

SEQ ID NO: 70177 - DNA, 20 bp, Artificial Sequence
  chemically synthesized
ttcaggcaccaccactgacc

SEQ ID NO: 70178 - DNA, 20 bp, Artificial Sequence
  chemically synthesized
tcaggcaccaccactgacct

SEQ ID NO: 70179 - DNA, 20 bp, Artificial Sequence
  chemically synthesized
gcaccaccactgacctggga

SEQ ID NO: 70180 - DNA, 20 bp, Artificial Sequence
  chemically synthesized
gacctgggacagtgaatcgt

SEQ ID NO: 70181 - DNA, 20 bp, Artificial Sequence
  chemically synthesized
gtaagtatgcctttcactgc

SEQ ID NO: 70182 - DNA, 20 bp, Artificial Sequence
  chemically synthesized
aagtatgcctttcactgcga

SEQ ID NO: 70183 - DNA, 20 bp, Artificial Sequence
  chemically synthesized
agtatgcctttcactgcgag

SEQ ID NO: 70184 - DNA, 20 bp, Artificial Sequence
  chemically synthesized
cctttcactgcgagaggttc

SEQ ID NO: 70185 - DNA, 20 bp, Artificial Sequence
  chemically synthesized
tttcactgcgagaggttctg

SEQ ID NO: 70186 - DNA, 20 bp, Artificial Sequence
  chemically synthesized
tcactgcgagaggttctgga

SEQ ID NO: 70187 - DNA, 20 bp, Artificial Sequence
  chemically synthesized
cactgcgagaggttctggag

SEQ ID NO: 70188 - DNA, 20 bp, Artificial Sequence
  chemically synthesized
gaggttctggagaggcttct

SEQ ID NO: 70189 - DNA, 20 bp, Artificial Sequence
  chemically synthesized
agaggcttctgagctcccca

SEQ ID NO: 70190 - DNA, 20 bp, Artificial Sequence
  chemically synthesized
cttctgagctccccatggcc

SEQ ID NO: 70191 - DNA, 20 bp, Artificial Sequence
  chemically synthesized
ttctgagctccccatggccc

SEQ ID NO: 70192 - DNA, 20 bp, Artificial Sequence
  chemically synthesized
tgagctccccatggcccagg

SEQ ID NO: 70193 - DNA, 20 bp, Artificial Sequence
  chemically synthesized
gagctccccatggcccaggc

SEQ ID NO: 70194 - DNA, 20 bp, Artificial Sequence
  chemically synthesized
ctccccatggcccaggcagg

SEQ ID NO: 70195 - DNA, 20 bp, Artificial Sequence
  chemically synthesized
cccatggcccaggcaggcag

SEQ ID NO: 70196 - DNA, 20 bp, Artificial Sequence
  chemically synthesized
ccatggcccaggcaggcagc

SEQ ID NO: 70197 - DNA, 20 bp, Artificial Sequence
  chemically synthesized
gcccaggcaggcagcaggtc

SEQ ID NO: 70198 - DNA, 20 bp, Artificial Sequence
  chemically synthesized
cccaggcaggcagcaggtct

SEQ ID NO: 70199 - DNA, 20 bp, Artificial Sequence
  chemically synthesized
ccaggcaggcagcaggtctg

SEQ ID NO: 70200 - DNA, 20 bp, Artificial Sequence
  chemically synthesized
ggcaggcagcaggtctgggg

SEQ ID NO: 70201 - DNA, 20 bp, Artificial Sequence
  chemically synthesized
gcaggcagcaggtctggggc

SEQ ID NO: 70202 - DNA, 20 bp, Artificial Sequence
  chemically synthesized
aggcagcaggtctggggcag

SEQ ID NO: 70203 - DNA, 20 bp, Artificial Sequence
  chemically synthesized
ggcagcaggtctggggcagg

SEQ ID NO: 70204 - DNA, 20 bp, Artificial Sequence
  chemically synthesized
gcagcaggtctggggcagga

SEQ ID NO: 70205 - DNA, 20 bp, Artificial Sequence
  chemically synthesized
cagcaggtctggggcaggag

SEQ ID NO: 70206 - DNA, 20 bp, Artificial Sequence
  chemically synthesized
agcaggtctggggcaggagg

SEQ ID NO: 70207 - DNA, 20 bp, Artificial Sequence
  chemically synthesized
gcaggtctggggcaggaggg

SEQ ID NO: 70208 - DNA, 20 bp, Artificial Sequence
  chemically synthesized
ctggggcaggaggggggttg

SEQ ID NO: 70209 - DNA, 20 bp, Artificial Sequence
  chemically synthesized
ggggcaggaggggggttgtg

SEQ ID NO: 70210 - DNA, 20 bp, Artificial Sequence
  chemically synthesized
gcaggaggggggttgtggag

SEQ ID NO: 70211 - DNA, 20 bp, Artificial Sequence
  chemically synthesized
caggaggggggttgtggagt

SEQ ID NO: 70212 - DNA, 20 bp, Artificial Sequence
  chemically synthesized
ggagtgggtatccgcctgct

SEQ ID NO: 70213 - DNA, 20 bp, Artificial Sequence
  chemically synthesized
gagtgggtatccgcctgctg

SEQ ID NO: 70214 - DNA, 20 bp, Artificial Sequence
  chemically synthesized
ggtatccgcctgctgaggtg

SEQ ID NO: 70215 - DNA, 20 bp, Artificial Sequence
  chemically synthesized
gtatccgcctgctgaggtgc

SEQ ID NO: 70216 - DNA, 20 bp, Artificial Sequence
  chemically synthesized
tatccgcctgctgaggtgca

SEQ ID NO: 70217 - DNA, 20 bp, Artificial Sequence
  chemically synthesized
ccgcctgctgaggtgcaggg

SEQ ID NO: 70218 - DNA, 20 bp, Artificial Sequence
  chemically synthesized
ctgctgaggtgcagggcaga

SEQ ID NO: 70219 - DNA, 20 bp, Artificial Sequence
  chemically synthesized
gctgaggtgcagggcagatg

SEQ ID NO: 70220 - DNA, 20 bp, Artificial Sequence
  chemically synthesized
tgaggtgcagggcagatgga

SEQ ID NO: 70221 - DNA, 20 bp, Artificial Sequence
  chemically synthesized
gaggtgcagggcagatggag

SEQ ID NO: 70222 - DNA, 20 bp, Artificial Sequence
  chemically synthesized
cagggcagatggagaggctg

SEQ ID NO: 70223 - DNA, 20 bp, Artificial Sequence
  chemically synthesized
cagatggagaggctgcagct

SEQ ID NO: 70224 - DNA, 20 bp, Artificial Sequence
  chemically synthesized
agctcctattttcataataa

SEQ ID NO: 70225 - DNA, 20 bp, Artificial Sequence
  chemically synthesized
tcctattttcataataacag

SEQ ID NO: 70226 - DNA, 20 bp, Artificial Sequence
  chemically synthesized
ttcataataacagcagccat

SEQ ID NO: 70227 - DNA, 20 bp, Artificial Sequence
  chemically synthesized
tcataataacagcagccatg

SEQ ID NO: 70228 - DNA, 20 bp, Artificial Sequence
  chemically synthesized
cataataacagcagccatga

SEQ ID NO: 70229 - DNA, 20 bp, Artificial Sequence
  chemically synthesized
gagggttgtgtcctgtttcc

SEQ ID NO: 70230 - DNA, 20 bp, Artificial Sequence
  chemically synthesized
tcctgtttcccagtcctgcc

SEQ ID NO: 70231 - DNA, 20 bp, Artificial Sequence
  chemically synthesized
agtcctgcccggtcccccct

SEQ ID NO: 70232 - DNA, 20 bp, Artificial Sequence
  chemically synthesized
ggtcccccctcggtacctcc

SEQ ID NO: 70233 - DNA, 20 bp, Artificial Sequence
  chemically synthesized
cccccctcggtacctcctgg

SEQ ID NO: 70234 - DNA, 20 bp, Artificial Sequence
  chemically synthesized
gtacctcctggtggatacac

SEQ ID NO: 70235 - DNA, 20 bp, Artificial Sequence
  chemically synthesized
gtggatacactggttcctgt

SEQ ID NO: 70236 - DNA, 20 bp, Artificial Sequence
  chemically synthesized
gatacactggttcctgtaag

SEQ ID NO: 70237 - DNA, 20 bp, Artificial Sequence
  chemically synthesized
acactggttcctgtaagcag

SEQ ID NO: 70238 - DNA, 20 bp, Artificial Sequence
  chemically synthesized
ctggttcctgtaagcagaag

SEQ ID NO: 70239 - DNA, 20 bp, Artificial Sequence
  chemically synthesized
tcctgtaagcagaagtggat

SEQ ID NO: 70240 - DNA, 20 bp, Artificial Sequence
  chemically synthesized
cctgtaagcagaagtggatg

SEQ ID NO: 70241 - DNA, 20 bp, Artificial Sequence
  chemically synthesized
ctgtaagcagaagtggatga

SEQ ID NO: 70242 - DNA, 20 bp, Artificial Sequence
  chemically synthesized
cagaagtggatgagggtgtc

SEQ ID NO: 70243 - DNA, 20 bp, Artificial Sequence
  chemically synthesized
agaagtggatgagggtgtct

SEQ ID NO: 70244 - DNA, 20 bp, Artificial Sequence
  chemically synthesized
gatgagggtgtctaggtctg

SEQ ID NO: 70245 - DNA, 20 bp, Artificial Sequence
  chemically synthesized
ggtgtctaggtctgcagtcc

SEQ ID NO: 70246 - DNA, 20 bp, Artificial Sequence
  chemically synthesized
ggtctgcagtcctggcaccc

SEQ ID NO: 70247 - DNA, 20 bp, Artificial Sequence
  chemically synthesized
gtctgcagtcctggcacccc

SEQ ID NO: 70248 - DNA, 20 bp, Artificial Sequence
  chemically synthesized
gcagtcctggcaccccagga

SEQ ID NO: 70249 - DNA, 20 bp, Artificial Sequence
  chemically synthesized
cagtcctggcaccccaggat

SEQ ID NO: 70250 - DNA, 20 bp, Artificial Sequence
  chemically synthesized
agtcctggcaccccaggatg

SEQ ID NO: 70251 - DNA, 20 bp, Artificial Sequence
  chemically synthesized
gtcctggcaccccaggatgg

SEQ ID NO: 70252 - DNA, 20 bp, Artificial Sequence
  chemically synthesized
caccccaggatgggggacac

SEQ ID NO: 70253 - DNA, 20 bp, Artificial Sequence
  chemically synthesized
caggatgggggacaccagcc

SEQ ID NO: 70254 - DNA, 20 bp, Artificial Sequence
  chemically synthesized
gggggacaccagccaagata

SEQ ID NO: 70255 - DNA, 20 bp, Artificial Sequence
  chemically synthesized
caccagccaagatacagcaa

SEQ ID NO: 70256 - DNA, 20 bp, Artificial Sequence
  chemically synthesized
aagatacagcaacagcaaca

SEQ ID NO: 70257 - DNA, 20 bp, Artificial Sequence
  chemically synthesized
acagcaacagcaacaaagcg

SEQ ID NO: 70258 - DNA, 20 bp, Artificial Sequence
  chemically synthesized
gccatttctttctgtttgca

SEQ ID NO: 70259 - DNA, 20 bp, Artificial Sequence
  chemically synthesized
tgcacagctcctctgtctgt

SEQ ID NO: 70260 - DNA, 20 bp, Artificial Sequence
  chemically synthesized
gcacagctcctctgtctgtc

SEQ ID NO: 70261 - DNA, 20 bp, Artificial Sequence
  chemically synthesized
cacagctcctctgtctgtcg

SEQ ID NO: 70262 - DNA, 20 bp, Artificial Sequence
  chemically synthesized
acagctcctctgtctgtcgg

SEQ ID NO: 70263 - DNA, 20 bp, Artificial Sequence
  chemically synthesized
tcctgtctgttgtctcctat

SEQ ID NO: 70264 - DNA, 20 bp, Artificial Sequence
  chemically synthesized
tcaccacctctcctactgct

SEQ ID NO: 70265 - DNA, 20 bp, Artificial Sequence
  chemically synthesized
caccacctctcctactgctt

SEQ ID NO: 70266 - DNA, 20 bp, Artificial Sequence
  chemically synthesized
tgcatctttctccccttcta

SEQ ID NO: 70267 - DNA, 20 bp, Artificial Sequence
  chemically synthesized
ctttctccccttctatagat

SEQ ID NO: 70268 - DNA, 20 bp, Artificial Sequence
  chemically synthesized
tttctccccttctatagatg

SEQ ID NO: 70269 - DNA, 20 bp, Artificial Sequence
  chemically synthesized
tctccccttctatagatgag

SEQ ID NO: 70270 - DNA, 20 bp, Artificial Sequence
  chemically synthesized
ctccccttctatagatgagg

SEQ ID NO: 70271 - DNA, 20 bp, Artificial Sequence
  chemically synthesized
cttctatagatgaggaggtt

SEQ ID NO: 70272 - DNA, 20 bp, Artificial Sequence
  chemically synthesized
ttctatagatgaggaggtta

SEQ ID NO: 70273 - DNA, 20 bp, Artificial Sequence
  chemically synthesized
tagatgaggaggttaaggtc

SEQ ID NO: 70274 - DNA, 20 bp, Artificial Sequence
  chemically synthesized
gatgaggaggttaaggtcca

SEQ ID NO: 70275 - DNA, 20 bp, Artificial Sequence
  chemically synthesized
tgaggaggttaaggtccaga

SEQ ID NO: 70276 - DNA, 20 bp, Artificial Sequence
  chemically synthesized
gaggaggttaaggtccagag

SEQ ID NO: 70277 - DNA, 20 bp, Artificial Sequence
  chemically synthesized
aggaggttaaggtccagaga

SEQ ID NO: 70278 - DNA, 20 bp, Artificial Sequence
  chemically synthesized
ggaggttaaggtccagagag

SEQ ID NO: 70279 - DNA, 20 bp, Artificial Sequence
  chemically synthesized
ggttaaggtccagagagggg

SEQ ID NO: 70280 - DNA, 20 bp, Artificial Sequence
  chemically synthesized
gttaaggtccagagaggggt

SEQ ID NO: 70281 - DNA, 20 bp, Artificial Sequence
  chemically synthesized
ttaaggtccagagaggggtg

SEQ ID NO: 70282 - DNA, 20 bp, Artificial Sequence
  chemically synthesized
aaggtccagagaggggtggg

SEQ ID NO: 70283 - DNA, 20 bp, Artificial Sequence
  chemically synthesized
aggtccagagaggggtgggg

SEQ ID NO: 70284 - DNA, 20 bp, Artificial Sequence
  chemically synthesized
agaggggtggggaggaacgc

SEQ ID NO: 70285 - DNA, 20 bp, Artificial Sequence
  chemically synthesized
ctcacattctccatcccctc

SEQ ID NO: 70286 - DNA, 20 bp, Artificial Sequence
  chemically synthesized
ccatcccctccagatatgac

SEQ ID NO: 70287 - DNA, 20 bp, Artificial Sequence
  chemically synthesized
catcccctccagatatgacc

SEQ ID NO: 70288 - DNA, 20 bp, Artificial Sequence
  chemically synthesized
cctccagatatgaccaggaa

SEQ ID NO: 70289 - DNA, 20 bp, Artificial Sequence
  chemically synthesized
gaccaggaacagacctgtgc

SEQ ID NO: 70290 - DNA, 20 bp, Artificial Sequence
  chemically synthesized
accaggaacagacctgtgcc

SEQ ID NO: 70291 - DNA, 20 bp, Artificial Sequence
  chemically synthesized
aacagacctgtgccaggcct

SEQ ID NO: 70292 - DNA, 20 bp, Artificial Sequence
  chemically synthesized
tgttcctggtcatatctgga

SEQ ID NO: 70293 - DNA, 20 bp, Artificial Sequence
  chemically synthesized
ggtcatatctggaggggatg

SEQ ID NO: 70294 - DNA, 20 bp, Artificial Sequence
  chemically synthesized
ttggctggtgtcccccatcc

SEQ ID NO: 70295 - DNA, 20 bp, Artificial Sequence
  chemically synthesized
tctgccctgcacctcagcag

SEQ ID NO: 70296 - DNA, 20 bp, Artificial Sequence
  chemically synthesized
tcctcgtccgtatttaagca

SEQ ID NO: 70297 - DNA, 20 bp, Artificial Sequence
  chemically synthesized
ggcaacgggggaggctgctg

SEQ ID NO: 70298 - DNA, 20 bp, Artificial Sequence
  chemically synthesized
caggggctaagtccactggc

SEQ ID NO: 70299 - DNA, 20 bp, Artificial Sequence
  chemically synthesized
ctaagtccactggctgggat

SEQ ID NO: 70300 - DNA, 20 bp, Artificial Sequence
  chemically synthesized
cttccactgcacttaccgaa

SEQ ID NO: 70301 - DNA, 20 bp, Artificial Sequence
  chemically synthesized
cgtcctgtgtccaaggtgga

SEQ ID NO: 70302 - DNA, 20 bp, Artificial Sequence
  chemically synthesized
tccaaggtggagggggtggc

SEQ ID NO: 70303 - DNA, 20 bp, Artificial Sequence
  chemically synthesized
gtgagtcagacagtctctgg

SEQ ID NO: 70304 - DNA, 20 bp, Artificial Sequence
  chemically synthesized
ctggccctctgctctcactg

SEQ ID NO: 70305 - DNA, 20 bp, Artificial Sequence
  chemically synthesized
gtagcaagatctaccattta

SEQ ID NO: 70306 - DNA, 20 bp, Artificial Sequence
  chemically synthesized
ttactgccgccctgggagat

SEQ ID NO: 70307 - DNA, 20 bp, Artificial Sequence
  chemically synthesized
tgccgccctgggagatcaga

SEQ ID NO: 70308 - DNA, 20 bp, Artificial Sequence
  chemically synthesized
tggcatggggggccgtgaga

SEQ ID NO: 70309 - DNA, 20 bp, Artificial Sequence
  chemically synthesized
actgtttcacctgcatccca

SEQ ID NO: 70310 - DNA, 20 bp, Artificial Sequence
  chemically synthesized
aagcatgcttgtgaagtgcc

SEQ ID NO: 70311 - DNA, 20 bp, Artificial Sequence
  chemically synthesized
gcacacagtaggctctttat

SEQ ID NO: 70312 - DNA, 20 bp, Artificial Sequence
  chemically synthesized
agtgtgatccgtatacagct

SEQ ID NO: 70313 - DNA, 20 bp, Artificial Sequence
  chemically synthesized
gtatacagcttggagtttct

SEQ ID NO: 70314 - DNA, 20 bp, Artificial Sequence
  chemically synthesized
tggatacatggcccccactc

SEQ ID NO: 70315 - DNA, 20 bp, Artificial Sequence
  chemically synthesized
ggaggcctttggagactgct

SEQ ID NO: 70316 - DNA, 20 bp, Artificial Sequence
  chemically synthesized
ggtggaggggaggggaggta

SEQ ID NO: 70317 - DNA, 20 bp, Artificial Sequence
  chemically synthesized
gtacgtgccgtagatacttg

SEQ ID NO: 70318 - DNA, 20 bp, Artificial Sequence
  chemically synthesized
gtgccgtagatacttgcaga

SEQ ID NO: 70319 - DNA, 20 bp, Artificial Sequence
  chemically synthesized
cgtagatacttgcagagtga

SEQ ID NO: 70320 - DNA, 20 bp, Artificial Sequence
  chemically synthesized
gatacttgcagagtgaatgg

SEQ ID NO: 70321 - DNA, 20 bp, Artificial Sequence
  chemically synthesized
ccaccttggggctctaccag

SEQ ID NO: 70322 - DNA, 20 bp, Artificial Sequence
  chemically synthesized
tctaccaggcgagtgaccca

SEQ ID NO: 70323 - DNA, 20 bp, Artificial Sequence
  chemically synthesized
tactggctgtgaggcctcag

SEQ ID NO: 70324 - DNA, 20 bp, Artificial Sequence
  chemically synthesized
aatttccctatctgtaaaat

SEQ ID NO: 70325 - DNA, 20 bp, Artificial Sequence
  chemically synthesized
gtaccttgttgagctgctgt

SEQ ID NO: 70326 - DNA, 20 bp, Artificial Sequence
  chemically synthesized
agttcaaggaaagctcagag

SEQ ID NO: 70327 - DNA, 20 bp, Artificial Sequence
  chemically synthesized
ggaaagctcagagacgggta

SEQ ID NO: 70328 - DNA, 20 bp, Artificial Sequence
  chemically synthesized
gtgtcaggggctggtgtcac

SEQ ID NO: 70329 - DNA, 20 bp, Artificial Sequence
  chemically synthesized
aggggctggtgtcactgggg

SEQ ID NO: 70330 - DNA, 20 bp, Artificial Sequence
  chemically synthesized
tcattcagttaccctgtgaa

SEQ ID NO: 70331 - DNA, 20 bp, Artificial Sequence
  chemically synthesized
ctgtccttcccctgagctgg

SEQ ID NO: 70332 - DNA, 20 bp, Artificial Sequence
  chemically synthesized
ccttcccctgagctggctga

SEQ ID NO: 70333 - DNA, 20 bp, Artificial Sequence
  chemically synthesized
tgtccctcccacctgtggaa

SEQ ID NO: 70334 - DNA, 20 bp, Artificial Sequence
  chemically synthesized
gtctcttctggcaggcacag

SEQ ID NO: 70335 - DNA, 20 bp, Artificial Sequence
  chemically synthesized
aggttgccgcccctccaacc

SEQ ID NO: 70336 - DNA, 20 bp, Artificial Sequence
  chemically synthesized
ttggttcagctcaggactct

SEQ ID NO: 70337 - DNA, 20 bp, Artificial Sequence
  chemically synthesized
gcccacccaggaagtagact

SEQ ID NO: 70338 - DNA, 20 bp, Artificial Sequence
  chemically synthesized
ggacaagtcaccctctccct

SEQ ID NO: 70339 - DNA, 20 bp, Artificial Sequence
  chemically synthesized
aggtacagtcacactgccca

SEQ ID NO: 70340 - DNA, 20 bp, Artificial Sequence
  chemically synthesized
cttgcggcaactcaaaggga

SEQ ID NO: 70341 - DNA, 20 bp, Artificial Sequence
  chemically synthesized
aagggagagggtgacttgtc

SEQ ID NO: 70342 - DNA, 20 bp, Artificial Sequence
  chemically synthesized
caggtgacatgccgggctgt

SEQ ID NO: 70343 - DNA, 20 bp, Artificial Sequence
  chemically synthesized
ctccacccgaagtctacttc

SEQ ID NO: 70344 - DNA, 20 bp, Artificial Sequence
  chemically synthesized
tgcctccacgcagcaaccct

SEQ ID NO: 70345 - DNA, 20 bp, Artificial Sequence
  chemically synthesized
agctgaaccaagaaggagga

SEQ ID NO: 70346 - DNA, 20 bp, Artificial Sequence
  chemically synthesized
gcctagccgctgctgctgcc

SEQ ID NO: 70347 - DNA, 20 bp, Artificial Sequence
  chemically synthesized
gtgggagggacagcagggct

SEQ ID NO: 70348 - DNA, 20 bp, Artificial Sequence
  chemically synthesized
gggacagcagggcttagagt

SEQ ID NO: 70349 - DNA, 20 bp, Artificial Sequence
  chemically synthesized
cacagcccagtgctggagct

SEQ ID NO: 70350 - DNA, 20 bp, Artificial Sequence
  chemically synthesized
gcccagtgctggagctgtga

SEQ ID NO: 70351 - DNA, 20 bp, Artificial Sequence
  chemically synthesized
tgtgagtggatgtagagcag

SEQ ID NO: 70352 - DNA, 20 bp, Artificial Sequence
  chemically synthesized
ggacaggggccctgaagcca

SEQ ID NO: 70353 - DNA, 20 bp, Artificial Sequence
  chemically synthesized
gagctcagagagaaggggag

SEQ ID NO: 70354 - DNA, 20 bp, Artificial Sequence
  chemically synthesized
agtttcccgctgcctgaaag

SEQ ID NO: 70355 - DNA, 20 bp, Artificial Sequence
  chemically synthesized
ggtggtacctactcccttca

SEQ ID NO: 70356 - DNA, 20 bp, Artificial Sequence
  chemically synthesized
ctactcccttcacagggtaa

SEQ ID NO: 70357 - DNA, 20 bp, Artificial Sequence
  chemically synthesized
tgaggcctcacagccagtaa

SEQ ID NO: 70358 - DNA, 20 bp, Artificial Sequence
  chemically synthesized
cagtaagtgggttccctggt

SEQ ID NO: 70359 - DNA, 20 bp, Artificial Sequence
  chemically synthesized
tggtctgaatgtgtgtgctg

SEQ ID NO: 70360 - DNA, 20 bp, Artificial Sequence
  chemically synthesized
tgtgtgtgctggaggatcct

SEQ ID NO: 70361 - DNA, 20 bp, Artificial Sequence
  chemically synthesized
tggaggcataaatgggactg

SEQ ID NO: 70362 - DNA, 20 bp, Artificial Sequence
  chemically synthesized
gccagctcccaagcaggttt

SEQ ID NO: 70363 - DNA, 20 bp, Artificial Sequence
  chemically synthesized
aatctgatttaggcttttaa

SEQ ID NO: 70364 - DNA, 20 bp, Artificial Sequence
  chemically synthesized
ccaaaggcctccaacaaccc

SEQ ID NO: 70365 - DNA, 20 bp, Artificial Sequence
  chemically synthesized
aaagaaactccaagctgtat

SEQ ID NO: 70366 - DNA, 20 bp, Artificial Sequence
  chemically synthesized
ggcacttcacaagcatgctt

SEQ ID NO: 70367 - DNA, 20 bp, Artificial Sequence
  chemically synthesized
gaatgaaacttccaactctt

SEQ ID NO: 70368 - DNA, 20 bp, Artificial Sequence
  chemically synthesized
ttttccatcgggaccatcaa

SEQ ID NO: 70369 - DNA, 20 bp, Artificial Sequence
  chemically synthesized
gtgtttgtgtctaaggctga

SEQ ID NO: 70370 - DNA, 20 bp, Artificial Sequence
  chemically synthesized
ctaaggctgactgggtaact

SEQ ID NO: 70371 - DNA, 20 bp, Artificial Sequence
  chemically synthesized
gtcttcagcatcaggcattt

SEQ ID NO: 70372 - DNA, 20 bp, Artificial Sequence
  chemically synthesized
ctaccagtggaacagccact

SEQ ID NO: 70373 - DNA, 20 bp, Artificial Sequence
  chemically synthesized
ctgtttgctcctccgataac

SEQ ID NO: 70374 - DNA, 20 bp, Artificial Sequence
  chemically synthesized
cagcctcccccgttgcccct

SEQ ID NO: 70375 - DNA, 20 bp, Artificial Sequence
  chemically synthesized
accaccactgacctgggaca

SEQ ID NO: 70376 - DNA, 20 bp, Artificial Sequence
  chemically synthesized
cagcaggtctggggcaggag

SEQ ID NO: 70377 - DNA, 20 bp, Artificial Sequence
  chemically synthesized
ctggggcaggaggggggttg

SEQ ID NO: 70378 - DNA, 20 bp, Artificial Sequence
  chemically synthesized
ggcaggaggggggttgtgga

SEQ ID NO: 70379 - DNA, 20 bp, Artificial Sequence
  chemically synthesized
ttcataataacagcagccat

SEQ ID NO: 70380 - DNA, 20 bp, Artificial Sequence
  chemically synthesized
tcccccctcggtacctcctg

SEQ ID NO: 70381 - DNA, 20 bp, Artificial Sequence
  chemically synthesized
actggttcctgtaagcagaa

SEQ ID NO: 70382 - DNA, 20 bp, Artificial Sequence
  chemically synthesized
tcctgtaagcagaagtggat

SEQ ID NO: 70383 - DNA, 20 bp, Artificial Sequence
  chemically synthesized
ggtctgcagtcctggcaccc

SEQ ID NO: 70384 - DNA, 20 bp, Artificial Sequence
  chemically synthesized
gaggaggttaaggtccagag

SEQ ID NO: 70385 - DNA, 20 bp, Artificial Sequence
  chemically synthesized
tggtcatatctggaggggat

SEQ ID NO: 70386 - DNA, 20 bp, Artificial Sequence
  chemically synthesized
acctcctcatctatagaagg

SEQ ID NO: 70387 - DNA, 20 bp, Artificial Sequence
  chemically synthesized
cagacagaggagctgtgcaa

SEQ ID NO: 70388 - DNA, 20 bp, Artificial Sequence
  chemically synthesized
cagaggagctgtgcaaacag

SEQ ID NO: 70389 - DNA, 20 bp, Artificial Sequence
  chemically synthesized
aaggagtcattgtacctggc

SEQ ID NO: 70390 - DNA, 20 bp, Artificial Sequence
  chemically synthesized
gctggccctctgctctcact

SEQ ID NO: 70391 - DNA, 20 bp, Artificial Sequence
  chemically synthesized
gagacgggtactgggtgtgc

SEQ ID NO: 70392 - DNA, 20 bp, Artificial Sequence
  chemically synthesized
tcacactgcccagaggatta

SEQ ID NO: 70393 - DNA, 20 bp, Artificial Sequence
  chemically synthesized
tcttccctctgcagctggcc

SEQ ID NO: 70394 - DNA, 20 bp, Artificial Sequence
  chemically synthesized
aaacaaaggcccagagaggg

SEQ ID NO: 70395 - DNA, 20 bp, Artificial Sequence
  chemically synthesized
agagtgggggccatgtatcc

SEQ ID NO: 70396 - DNA, 20 bp, Artificial Sequence
  chemically synthesized
ctggttttccaggagcaaaa

SEQ ID NO: 70397 - DNA, 20 bp, Artificial Sequence
  chemically synthesized
tgtttctgtttttgctcctg

SEQ ID NO: 70398 - DNA, 20 bp, Artificial Sequence
  chemically synthesized
gggggtcattgtgcagatgg

SEQ ID NO: 70399 - DNA, 20 bp, Artificial Sequence
  chemically synthesized
cacactggttttccaggagc

SEQ ID NO: 70400 - DNA, 20 bp, Artificial Sequence
  chemically synthesized
ccaagcagtaggagaggtgg

SEQ ID NO: 70401 - DNA, 20 bp, Artificial Sequence
  chemically synthesized
gtgcaaacagaaagaaatgg

SEQ ID NO: 70402 - DNA, 20 bp, Artificial Sequence
  chemically synthesized
acctagacaccctcatccac

SEQ ID NO: 70403 - DNA, 20 bp, Artificial Sequence
  chemically synthesized
tctcgcagtgaaaggcatac

SEQ ID NO: 70404 - DNA, 20 bp, Artificial Sequence
  chemically synthesized
gtcgcccgcctacgctgccc

SEQ ID NO: 70405 - DNA, 20 bp, Artificial Sequence
  chemically synthesized
gacgctttgcctgggcagtg

SEQ ID NO: 70406 - DNA, 20 bp, Artificial Sequence
  chemically synthesized
gagctgtgctgcctcaggca

SEQ ID NO: 70407 - DNA, 20 bp, Artificial Sequence
  chemically synthesized
cttcacctctctgaaccagg

SEQ ID NO: 70408 - DNA, 20 bp, Artificial Sequence
  chemically synthesized
cacctgcatcccaaagagtt

SEQ ID NO: 70409 - DNA, 20 bp, Artificial Sequence
  chemically synthesized
gttggaagtttcattcccaa

SEQ ID NO: 70410 - DNA, 20 bp, Artificial Sequence
  chemically synthesized
ttatgtgggtctgcacagcc

SEQ ID NO: 70411 - DNA, 20 bp, Artificial Sequence
  chemically synthesized
tcaattttgaccagcctcag

SEQ ID NO: 70412 - DNA, 20 bp, Artificial Sequence
  chemically synthesized
ttgaccagcctcaggcctgt

SEQ ID NO: 70413 - DNA, 20 bp, Artificial Sequence
  chemically synthesized
gaaaaccagtgtgatccgta

SEQ ID NO: 70414 - DNA, 20 bp, Artificial Sequence
  chemically synthesized
agtgtgatccgtatacagct

SEQ ID NO: 70415 - DNA, 20 bp, Artificial Sequence
  chemically synthesized
gttgaggctagtggggcccc

SEQ ID NO: 70416 - DNA, 20 bp, Artificial Sequence
  chemically synthesized
caatccctttaaaagcctaa

SEQ ID NO: 70417 - DNA, 20 bp, Artificial Sequence
  chemically synthesized
gcccgctgtgcaacccgcaa

SEQ ID NO: 70418 - DNA, 20 bp, Artificial Sequence
  chemically synthesized
tggctgtgaggcctcaggtg

SEQ ID NO: 70419 - DNA, 20 bp, Artificial Sequence
  chemically synthesized
tgtaccttgttgagctgctg

SEQ ID NO: 70420 - DNA, 20 bp, Artificial Sequence
  chemically synthesized
ggtggggtgggccacacttg

SEQ ID NO: 70421 - DNA, 20 bp, Artificial Sequence
  chemically synthesized
ccttccctgcagctccatcc

SEQ ID NO: 70422 - DNA, 20 bp, Artificial Sequence
  chemically synthesized
atttcttcccctctctgggc

SEQ ID NO: 70423 - DNA, 20 bp, Artificial Sequence
  chemically synthesized
cagtaggctggggaggggcg

SEQ ID NO: 70424 - DNA, 20 bp, Artificial Sequence
  chemically synthesized
gaggtacagtcacactgccc

SEQ ID NO: 70425 - DNA, 20 bp, Artificial Sequence
  chemically synthesized
agacctggcaccaataactg

SEQ ID NO: 70426 - DNA, 20 bp, Artificial Sequence
  chemically synthesized
caggtgacatgccgggctgt

SEQ ID NO: 70427 - DNA, 20 bp, Artificial Sequence
  chemically synthesized
cctgtgcctgccagaagaga

SEQ ID NO: 70428 - DNA, 20 bp, Artificial Sequence
  chemically synthesized
cagaagagacagagcttgag

SEQ ID NO: 70429 - DNA, 20 bp, Artificial Sequence
  chemically synthesized
tccacaggtgggagggacag

SEQ ID NO: 70430 - DNA, 20 bp, Artificial Sequence
  chemically synthesized
gaaggggaggggagtctgag

SEQ ID NO: 70431 - DNA, 20 bp, Artificial Sequence
  chemically synthesized
ggagggagggcagcatcagg

SEQ ID NO: 70432 - DNA, 20 bp, Artificial Sequence
  chemically synthesized
ggcacacccagtacccgtct

SEQ ID NO: 70433 - DNA, 20 bp, Artificial Sequence
  chemically synthesized
gcacgtacgccagctcccaa

SEQ ID NO: 70434 - DNA, 20 bp, Artificial Sequence
  chemically synthesized
gttgcacagcgggcgatgca

SEQ ID NO: 70435 - DNA, 20 bp, Artificial Sequence
  chemically synthesized
agcgggcgatgcaatctgat

SEQ ID NO: 70436 - DNA, 20 bp, Artificial Sequence
  chemically synthesized
caatctgatttaggctttta

SEQ ID NO: 70437 - DNA, 20 bp, Artificial Sequence
  chemically synthesized
ccaagctgtatacggatcac

SEQ ID NO: 70438 - DNA, 20 bp, Artificial Sequence
  chemically synthesized
tcacccgaggcacttcacaa

SEQ ID NO: 70439 - DNA, 20 bp, Artificial Sequence
  chemically synthesized
agcacagctcttctttacag

SEQ ID NO: 70440 - DNA, 20 bp, Artificial Sequence
  chemically synthesized
ttccatcgggaccatcaaga

SEQ ID NO: 70441 - DNA, 20 bp, Artificial Sequence
  chemically synthesized
gagcggtctctccgctctga

SEQ ID NO: 70442 - DNA, 20 bp, Artificial Sequence
  chemically synthesized
gctaccagtggaacagccac

SEQ ID NO: 70443 - DNA, 20 bp, Artificial Sequence
  chemically synthesized
ccaccttggacacaggacgc

SEQ ID NO: 70444 - DNA, 20 bp, Artificial Sequence
  chemically synthesized
tcccagccagtggacttagc

SEQ ID NO: 70445 - DNA, 20 bp, Artificial Sequence
  chemically synthesized
ccccgttgcccctctggatc

SEQ ID NO: 70446 - DNA, 20 bp, Artificial Sequence
  chemically synthesized
cgaggacagggccctgtctc

SEQ ID NO: 70447 - DNA, 20 bp, Artificial Sequence
  chemically synthesized
ttcactgcgagaggttctgg

SEQ ID NO: 70448 - DNA, 20 bp, Artificial Sequence
  chemically synthesized
cagcagccatgagggttgtg

SEQ ID NO: 70449 - DNA, 20 bp, Artificial Sequence
  chemically synthesized
aacaaagcgcagccatttct

SEQ ID NO: 70450 - DNA, 20 bp, Artificial Sequence
  chemically synthesized
ataagcctcaccacctctcc

SEQ ID NO: 70451 - DNA, 22 bp, Artificial Sequence
  chemically synthesized
aggcctggcacaggtctgttcc

SEQ ID NO: 70452 - DNA, 22 bp, Artificial Sequence
  chemically synthesized
gcacaggtctgttcctggtcat

SEQ ID NO: 70453 - DNA, 22 bp, Artificial Sequence
  chemically synthesized
ttcctggtcatatctggagggg

SEQ ID NO: 70454 - DNA, 22 bp, Artificial Sequence
  chemically synthesized
ctggtcatatctggaggggatg

SEQ ID NO: 70455 - DNA, 22 bp, Artificial Sequence
  chemically synthesized
gtcatatctggaggggatggag

SEQ ID NO: 70456 - DNA, 22 bp, Artificial Sequence
  chemically synthesized
gaggggatggagaatgtgagcc

SEQ ID NO: 70457 - DNA, 22 bp, Artificial Sequence
  chemically synthesized
ctccccacccctctctggacct

SEQ ID NO: 70458 - DNA, 22 bp, Artificial Sequence
  chemically synthesized
cccacccctctctggaccttaa

SEQ ID NO: 70459 - DNA, 22 bp, Artificial Sequence
  chemically synthesized
tctggaccttaacctcctcatc

SEQ ID NO: 70460 - DNA, 22 bp, Artificial Sequence
  chemically synthesized
tggaccttaacctcctcatcta

SEQ ID NO: 70461 - DNA, 22 bp, Artificial Sequence
  chemically synthesized
gaccttaacctcctcatctata

SEQ ID NO: 70462 - DNA, 22 bp, Artificial Sequence
  chemically synthesized
aacctcctcatctatagaaggg

SEQ ID NO: 70463 - DNA, 22 bp, Artificial Sequence
  chemically synthesized
acctcctcatctatagaagggg

SEQ ID NO: 70464 - DNA, 22 bp, Artificial Sequence
  chemically synthesized
ctcatctatagaaggggagaaa

SEQ ID NO: 70465 - DNA, 22 bp, Artificial Sequence
  chemically synthesized
atctatagaaggggagaaagat

SEQ ID NO: 70466 - DNA, 22 bp, Artificial Sequence
  chemically synthesized
tagaaggggagaaagatgcatg

SEQ ID NO: 70467 - DNA, 22 bp, Artificial Sequence
  chemically synthesized
ataggagacaacagacaggagc

SEQ ID NO: 70468 - DNA, 22 bp, Artificial Sequence
  chemically synthesized
taggagacaacagacaggagcc

SEQ ID NO: 70469 - DNA, 22 bp, Artificial Sequence
  chemically synthesized
tgcaaacagaaagaaatggctg

SEQ ID NO: 70470 - DNA, 22 bp, Artificial Sequence
  chemically synthesized
cgctttgttgctgttgctgtat

SEQ ID NO: 70471 - DNA, 22 bp, Artificial Sequence
  chemically synthesized
tgttgctgttgctgtatcttgg

SEQ ID NO: 70472 - DNA, 22 bp, Artificial Sequence
  chemically synthesized
gttgctgttgctgtatcttggc

SEQ ID NO: 70473 - DNA, 22 bp, Artificial Sequence
  chemically synthesized
ttgctgttgctgtatcttggct

SEQ ID NO: 70474 - DNA, 22 bp, Artificial Sequence
  chemically synthesized
ctgttgctgtatcttggctggt

SEQ ID NO: 70475 - DNA, 22 bp, Artificial Sequence
  chemically synthesized
ttgctgtatcttggctggtgtc

SEQ ID NO: 70476 - DNA, 22 bp, Artificial Sequence
  chemically synthesized
ctgtatcttggctggtgtcccc

SEQ ID NO: 70477 - DNA, 22 bp, Artificial Sequence
  chemically synthesized
tatcttggctggtgtcccccat

SEQ ID NO: 70478 - DNA, 22 bp, Artificial Sequence
  chemically synthesized
ggctggtgtcccccatcctggg

SEQ ID NO: 70479 - DNA, 22 bp, Artificial Sequence
  chemically synthesized
gctggtgtcccccatcctgggg

SEQ ID NO: 70480 - DNA, 22 bp, Artificial Sequence
  chemically synthesized
gtgtcccccatcctggggtgcc

SEQ ID NO: 70481 - DNA, 22 bp, Artificial Sequence
  chemically synthesized
gggtgccaggactgcagaccta

SEQ ID NO: 70482 - DNA, 22 bp, Artificial Sequence
  chemically synthesized
cagacctagacaccctcatcca

SEQ ID NO: 70483 - DNA, 22 bp, Artificial Sequence
  chemically synthesized
gacaccctcatccacttctgct

SEQ ID NO: 70484 - DNA, 22 bp, Artificial Sequence
  chemically synthesized
atccacttctgcttacaggaac

SEQ ID NO: 70485 - DNA, 22 bp, Artificial Sequence
  chemically synthesized
ctgcttacaggaaccagtgtat

SEQ ID NO: 70486 - DNA, 22 bp, Artificial Sequence
  chemically synthesized
tgcttacaggaaccagtgtatc

SEQ ID NO: 70487 - DNA, 22 bp, Artificial Sequence
  chemically synthesized
cttacaggaaccagtgtatcca

SEQ ID NO: 70488 - DNA, 22 bp, Artificial Sequence
  chemically synthesized
acaggaaccagtgtatccacca

SEQ ID NO: 70489 - DNA, 22 bp, Artificial Sequence
  chemically synthesized
caggaaccagtgtatccaccag

SEQ ID NO: 70490 - DNA, 22 bp, Artificial Sequence
  chemically synthesized
ggaaacaggacacaaccctcat

SEQ ID NO: 70491 - DNA, 22 bp, Artificial Sequence
  chemically synthesized
atggctgctgttattatgaaaa

SEQ ID NO: 70492 - DNA, 22 bp, Artificial Sequence
  chemically synthesized
ctgttattatgaaaataggagc

SEQ ID NO: 70493 - DNA, 22 bp, Artificial Sequence
  chemically synthesized
ttattatgaaaataggagctca

SEQ ID NO: 70494 - DNA, 22 bp, Artificial Sequence
  chemically synthesized
ttatgaaaataggagctcagct

SEQ ID NO: 70495 - DNA, 22 bp, Artificial Sequence
  chemically synthesized
tgaaaataggagctcagctgca

SEQ ID NO: 70496 - DNA, 22 bp, Artificial Sequence
  chemically synthesized
agctgcagcctctccatctgcc

SEQ ID NO: 70497 - DNA, 22 bp, Artificial Sequence
  chemically synthesized
cagcctctccatctgccctgca

SEQ ID NO: 70498 - DNA, 22 bp, Artificial Sequence
  chemically synthesized
tccatctgccctgcacctcagc

SEQ ID NO: 70499 - DNA, 22 bp, Artificial Sequence
  chemically synthesized
catctgccctgcacctcagcag

SEQ ID NO: 70500 - DNA, 22 bp, Artificial Sequence
  chemically synthesized
ccctgcacctcagcaggcggat

SEQ ID NO: 70501 - DNA, 22 bp, Artificial Sequence
  chemically synthesized
cacctcagcaggcggataccca

SEQ ID NO: 70502 - DNA, 22 bp, Artificial Sequence
  chemically synthesized
agcaggcggatacccactccac

SEQ ID NO: 70503 - DNA, 22 bp, Artificial Sequence
  chemically synthesized
cacaacccccctcctgccccag

SEQ ID NO: 70504 - DNA, 22 bp, Artificial Sequence
  chemically synthesized
ctgccccagacctgctgcctgc

SEQ ID NO: 70505 - DNA, 22 bp, Artificial Sequence
  chemically synthesized
ccccagacctgctgcctgcctg

SEQ ID NO: 70506 - DNA, 22 bp, Artificial Sequence
  chemically synthesized
ctgcctgcctgggccatgggga

SEQ ID NO: 70507 - DNA, 22 bp, Artificial Sequence
  chemically synthesized
cctgcctgggccatggggagct

SEQ ID NO: 70508 - DNA, 22 bp, Artificial Sequence
  chemically synthesized
cctgggccatggggagctcaga

SEQ ID NO: 70509 - DNA, 22 bp, Artificial Sequence
  chemically synthesized
ggccatggggagctcagaagcc

SEQ ID NO: 70510 - DNA, 22 bp, Artificial Sequence
  chemically synthesized
agaagcctctccagaacctctc

SEQ ID NO: 70511 - DNA, 22 bp, Artificial Sequence
  chemically synthesized
tccagaacctctcgcagtgaaa

SEQ ID NO: 70512 - DNA, 22 bp, Artificial Sequence
  chemically synthesized
cagaacctctcgcagtgaaagg

SEQ ID NO: 70513 - DNA, 22 bp, Artificial Sequence
  chemically synthesized
tcgcagtgaaaggcatacttac

SEQ ID NO: 70514 - DNA, 22 bp, Artificial Sequence
  chemically synthesized
gcagtgaaaggcatacttacga

SEQ ID NO: 70515 - DNA, 22 bp, Artificial Sequence
  chemically synthesized
acgattcactgtcccaggtcag

SEQ ID NO: 70516 - DNA, 22 bp, Artificial Sequence
  chemically synthesized
cgattcactgtcccaggtcagt

SEQ ID NO: 70517 - DNA, 22 bp, Artificial Sequence
  chemically synthesized
actgtcccaggtcagtggtggt

SEQ ID NO: 70518 - DNA, 22 bp, Artificial Sequence
  chemically synthesized
tcccaggtcagtggtggtgcct

SEQ ID NO: 70519 - DNA, 22 bp, Artificial Sequence
  chemically synthesized
aagctgaggagacagggccctg

SEQ ID NO: 70520 - DNA, 22 bp, Artificial Sequence
  chemically synthesized
aggagacagggccctgtcctcg

SEQ ID NO: 70521 - DNA, 22 bp, Artificial Sequence
  chemically synthesized
tcctcgtccgtatttaagcagt

SEQ ID NO: 70522 - DNA, 22 bp, Artificial Sequence
  chemically synthesized
gtccgtatttaagcagtggatc

SEQ ID NO: 70523 - DNA, 22 bp, Artificial Sequence
  chemically synthesized
aagcagtggatccagaggggca

SEQ ID NO: 70524 - DNA, 22 bp, Artificial Sequence
  chemically synthesized
agcagtggatccagaggggcaa

SEQ ID NO: 70525 - DNA, 22 bp, Artificial Sequence
  chemically synthesized
ctggtgaatattaaccaaggtc

SEQ ID NO: 70526 - DNA, 22 bp, Artificial Sequence
  chemically synthesized
gtgaatattaaccaaggtcacc

SEQ ID NO: 70527 - DNA, 22 bp, Artificial Sequence
  chemically synthesized
accaaggtcaccccagttatcg

SEQ ID NO: 70528 - DNA, 22 bp, Artificial Sequence
  chemically synthesized
tcggaggagcaaacaggggcta

SEQ ID NO: 70529 - DNA, 22 bp, Artificial Sequence
  chemically synthesized
agtccactggctgggatctgag

SEQ ID NO: 70530 - DNA, 22 bp, Artificial Sequence
  chemically synthesized
gctgggatctgagtcgcccgcc

SEQ ID NO: 70531 - DNA, 22 bp, Artificial Sequence
  chemically synthesized
ggatctgagtcgcccgcctacg

SEQ ID NO: 70532 - DNA, 22 bp, Artificial Sequence
  chemically synthesized
agtcgcccgcctacgctgcccg

SEQ ID NO: 70533 - DNA, 22 bp, Artificial Sequence
  chemically synthesized
cgctgcccggacgctttgcctg

SEQ ID NO: 70534 - DNA, 22 bp, Artificial Sequence
  chemically synthesized
cccggacgctttgcctgggcag

SEQ ID NO: 70535 - DNA, 22 bp, Artificial Sequence
  chemically synthesized
tgcctgggcagtgtacagcttc

SEQ ID NO: 70536 - DNA, 22 bp, Artificial Sequence
  chemically synthesized
gcctgggcagtgtacagcttcc

SEQ ID NO: 70537 - DNA, 22 bp, Artificial Sequence
  chemically synthesized
cctgggcagtgtacagcttcca

SEQ ID NO: 70538 - DNA, 22 bp, Artificial Sequence
  chemically synthesized
ggcagtgtacagcttccactgc

SEQ ID NO: 70539 - DNA, 22 bp, Artificial Sequence
  chemically synthesized
ccactgcacttaccgaaaggag

SEQ ID NO: 70540 - DNA, 22 bp, Artificial Sequence
  chemically synthesized
cactgcacttaccgaaaggagt

SEQ ID NO: 70541 - DNA, 22 bp, Artificial Sequence
  chemically synthesized
cacttaccgaaaggagtcattg

SEQ ID NO: 70542 - DNA, 22 bp, Artificial Sequence
  chemically synthesized
accgaaaggagtcattgtacct

SEQ ID NO: 70543 - DNA, 22 bp, Artificial Sequence
  chemically synthesized
ccgaaaggagtcattgtacctg

SEQ ID NO: 70544 - DNA, 22 bp, Artificial Sequence
  chemically synthesized
tacctggctcagaaaccacagc

SEQ ID NO: 70545 - DNA, 22 bp, Artificial Sequence
  chemically synthesized
gctcagaaaccacagcgtcctg

SEQ ID NO: 70546 - DNA, 22 bp, Artificial Sequence
  chemically synthesized
agaaaccacagcgtcctgtgtc

SEQ ID NO: 70547 - DNA, 22 bp, Artificial Sequence
  chemically synthesized
tgtccaaggtggagggggtggc

SEQ ID NO: 70548 - DNA, 22 bp, Artificial Sequence
  chemically synthesized
tgggagagtaccacttagctgg

SEQ ID NO: 70549 - DNA, 22 bp, Artificial Sequence
  chemically synthesized
ggagagtaccacttagctggcc

SEQ ID NO: 70550 - DNA, 22 bp, Artificial Sequence
  chemically synthesized
agctggccctctgctctcactg

SEQ ID NO: 70551 - DNA, 22 bp, Artificial Sequence
  chemically synthesized
gctggccctctgctctcactgc

SEQ ID NO: 70552 - DNA, 22 bp, Artificial Sequence
  chemically synthesized
gccctctgctctcactgcagaa

SEQ ID NO: 70553 - DNA, 22 bp, Artificial Sequence
  chemically synthesized
tgctctcactgcagaatcctta

SEQ ID NO: 70554 - DNA, 22 bp, Artificial Sequence
  chemically synthesized
ctctcactgcagaatccttagt

SEQ ID NO: 70555 - DNA, 22 bp, Artificial Sequence
  chemically synthesized
tcactgcagaatccttagtggc

SEQ ID NO: 70556 - DNA, 22 bp, Artificial Sequence
  chemically synthesized
actgcagaatccttagtggctg

SEQ ID NO: 70557 - DNA, 22 bp, Artificial Sequence
  chemically synthesized
cagaatccttagtggctgttcc

SEQ ID NO: 70558 - DNA, 22 bp, Artificial Sequence
  chemically synthesized
agtggctgttccactggtagca

SEQ ID NO: 70559 - DNA, 22 bp, Artificial Sequence
  chemically synthesized
gtggctgttccactggtagcaa

SEQ ID NO: 70560 - DNA, 22 bp, Artificial Sequence
  chemically synthesized
ttccactggtagcaagatctac

SEQ ID NO: 70561 - DNA, 22 bp, Artificial Sequence
  chemically synthesized
cactggtagcaagatctaccat

SEQ ID NO: 70562 - DNA, 22 bp, Artificial Sequence
  chemically synthesized
gtagcaagatctaccatttact

SEQ ID NO: 70563 - DNA, 22 bp, Artificial Sequence
  chemically synthesized
ccatttactgagtcaccccaaa

SEQ ID NO: 70564 - DNA, 22 bp, Artificial Sequence
  chemically synthesized
actgagtcaccccaaaatgcct

SEQ ID NO: 70565 - DNA, 22 bp, Artificial Sequence
  chemically synthesized
ctgagtcaccccaaaatgcctg

SEQ ID NO: 70566 - DNA, 22 bp, Artificial Sequence
  chemically synthesized
agtcaccccaaaatgcctgatg

SEQ ID NO: 70567 - DNA, 22 bp, Artificial Sequence
  chemically synthesized
atgctgaagacttactgccgcc

SEQ ID NO: 70568 - DNA, 22 bp, Artificial Sequence
  chemically synthesized
aagacttactgccgccctggga

SEQ ID NO: 70569 - DNA, 22 bp, Artificial Sequence
  chemically synthesized
actgccgccctgggagatcaga

SEQ ID NO: 70570 - DNA, 22 bp, Artificial Sequence
  chemically synthesized
ctgccgccctgggagatcagag

SEQ ID NO: 70571 - DNA, 22 bp, Artificial Sequence
  chemically synthesized
ccgccctgggagatcagagtgg

SEQ ID NO: 70572 - DNA, 22 bp, Artificial Sequence
  chemically synthesized
ggagatcagagtgggttagagc

SEQ ID NO: 70573 - DNA, 22 bp, Artificial Sequence
  chemically synthesized
gagcccatttgacagatgagga

SEQ ID NO: 70574 - DNA, 22 bp, Artificial Sequence
  chemically synthesized
gacagatgaggaaacaggctca

SEQ ID NO: 70575 - DNA, 22 bp, Artificial Sequence
  chemically synthesized
acagatgaggaaacaggctcag

SEQ ID NO: 70576 - DNA, 22 bp, Artificial Sequence
  chemically synthesized
agagcggagagaccgctcatcc

SEQ ID NO: 70577 - DNA, 22 bp, Artificial Sequence
  chemically synthesized
atccaaagttacccagtcagcc

SEQ ID NO: 70578 - DNA, 22 bp, Artificial Sequence
  chemically synthesized
cccagtcagccttagacacaaa

SEQ ID NO: 70579 - DNA, 22 bp, Artificial Sequence
  chemically synthesized
agacacaaacaccctcttgatg

SEQ ID NO: 70580 - DNA, 22 bp, Artificial Sequence
  chemically synthesized
gacacaaacaccctcttgatgg

SEQ ID NO: 70581 - DNA, 22 bp, Artificial Sequence
  chemically synthesized
ttgatggtcccgatggaaaaat

SEQ ID NO: 70582 - DNA, 22 bp, Artificial Sequence
  chemically synthesized
gatggtcccgatggaaaaatgg

SEQ ID NO: 70583 - DNA, 22 bp, Artificial Sequence
  chemically synthesized
atggtcccgatggaaaaatgga

SEQ ID NO: 70584 - DNA, 22 bp, Artificial Sequence
  chemically synthesized
aggcagacacaaccgtcaggct

SEQ ID NO: 70585 - DNA, 22 bp, Artificial Sequence
  chemically synthesized
gcatggggggccgtgagacagg

SEQ ID NO: 70586 - DNA, 22 bp, Artificial Sequence
  chemically synthesized
taaagaagagctgtgctgcctc

SEQ ID NO: 70587 - DNA, 22 bp, Artificial Sequence
  chemically synthesized
tgctgcctcaggcaggccgctt

SEQ ID NO: 70588 - DNA, 22 bp, Artificial Sequence
  chemically synthesized
cctcaggcaggccgcttcacct

SEQ ID NO: 70589 - DNA, 22 bp, Artificial Sequence
  chemically synthesized
aggcaggccgcttcacctctct

SEQ ID NO: 70590 - DNA, 22 bp, Artificial Sequence
  chemically synthesized
cacctctctgaaccaggaactg

SEQ ID NO: 70591 - DNA, 22 bp, Artificial Sequence
  chemically synthesized
acctctctgaaccaggaactgt

SEQ ID NO: 70592 - DNA, 22 bp, Artificial Sequence
  chemically synthesized
tctgaaccaggaactgtttcac

SEQ ID NO: 70593 - DNA, 22 bp, Artificial Sequence
  chemically synthesized
tgaaccaggaactgtttcacct

SEQ ID NO: 70594 - DNA, 22 bp, Artificial Sequence
  chemically synthesized
aaccaggaactgtttcacctgc

SEQ ID NO: 70595 - DNA, 22 bp, Artificial Sequence
  chemically synthesized
tttcacctgcatcccaaagagt

SEQ ID NO: 70596 - DNA, 22 bp, Artificial Sequence
  chemically synthesized
cacctgcatcccaaagagttgg

SEQ ID NO: 70597 - DNA, 22 bp, Artificial Sequence
  chemically synthesized
acctgcatcccaaagagttgga

SEQ ID NO: 70598 - DNA, 22 bp, Artificial Sequence
  chemically synthesized
catcccaaagagttggaagttt

SEQ ID NO: 70599 - DNA, 22 bp, Artificial Sequence
  chemically synthesized
gaagtttcattcccaagcatgc

SEQ ID NO: 70600 - DNA, 22 bp, Artificial Sequence
  chemically synthesized
cattcccaagcatgcttgtgaa

SEQ ID NO: 70601 - DNA, 22 bp, Artificial Sequence
  chemically synthesized
attcccaagcatgcttgtgaag

SEQ ID NO: 70602 - DNA, 22 bp, Artificial Sequence
  chemically synthesized
ccaagcatgcttgtgaagtgcc

SEQ ID NO: 70603 - DNA, 22 bp, Artificial Sequence
  chemically synthesized
gtgaagtgcctcgggtgaagtg

SEQ ID NO: 70604 - DNA, 22 bp, Artificial Sequence
  chemically synthesized
tgaagtgcctcgggtgaagtgc

SEQ ID NO: 70605 - DNA, 22 bp, Artificial Sequence
  chemically synthesized
gggtgaagtgcctggcacacag

SEQ ID NO: 70606 - DNA, 22 bp, Artificial Sequence
  chemically synthesized
gcacacagtaggctctttatgt

SEQ ID NO: 70607 - DNA, 22 bp, Artificial Sequence
  chemically synthesized
tttatgtgggtctgcacagccc

SEQ ID NO: 70608 - DNA, 22 bp, Artificial Sequence
  chemically synthesized
tatgtgggtctgcacagccctc

SEQ ID NO: 70609 - DNA, 22 bp, Artificial Sequence
  chemically synthesized
atgtgggtctgcacagccctct

SEQ ID NO: 70610 - DNA, 22 bp, Artificial Sequence
  chemically synthesized
tgtgggtctgcacagccctctg

SEQ ID NO: 70611 - DNA, 22 bp, Artificial Sequence
  chemically synthesized
cacagccctctgcttagtctgc

SEQ ID NO: 70612 - DNA, 22 bp, Artificial Sequence
  chemically synthesized
tgcttagtctgccccccaggct

SEQ ID NO: 70613 - DNA, 22 bp, Artificial Sequence
  chemically synthesized
cttagtctgccccccaggctgc

SEQ ID NO: 70614 - DNA, 22 bp, Artificial Sequence
  chemically synthesized
agtctgccccccaggctgctca

SEQ ID NO: 70615 - DNA, 22 bp, Artificial Sequence
  chemically synthesized
gtctgccccccaggctgctcag

SEQ ID NO: 70616 - DNA, 22 bp, Artificial Sequence
  chemically synthesized
ccccccaggctgctcagagcag

SEQ ID NO: 70617 - DNA, 22 bp, Artificial Sequence
  chemically synthesized
ctcagagcaggaggaggttcaa

SEQ ID NO: 70618 - DNA, 22 bp, Artificial Sequence
  chemically synthesized
agagcaggaggaggttcaattt

SEQ ID NO: 70619 - DNA, 22 bp, Artificial Sequence
  chemically synthesized
aattttgaccagcctcaggcct

SEQ ID NO: 70620 - DNA, 22 bp, Artificial Sequence
  chemically synthesized
tgaccagcctcaggcctgtttc

SEQ ID NO: 70621 - DNA, 22 bp, Artificial Sequence
  chemically synthesized
gaccagcctcaggcctgtttct

SEQ ID NO: 70622 - DNA, 22 bp, Artificial Sequence
  chemically synthesized
accagcctcaggcctgtttctg

SEQ ID NO: 70623 - DNA, 22 bp, Artificial Sequence
  chemically synthesized
aggcctgtttctgtttttgctc

SEQ ID NO: 70624 - DNA, 22 bp, Artificial Sequence
  chemically synthesized
tttctgtttttgctcctggaaa

SEQ ID NO: 70625 - DNA, 22 bp, Artificial Sequence
  chemically synthesized
ctgtttttgctcctggaaaacc

SEQ ID NO: 70626 - DNA, 22 bp, Artificial Sequence
  chemically synthesized
tgtttttgctcctggaaaacca

SEQ ID NO: 70627 - DNA, 22 bp, Artificial Sequence
  chemically synthesized
tttttgctcctggaaaaccagt

SEQ ID NO: 70628 - DNA, 22 bp, Artificial Sequence
  chemically synthesized
ttgctcctggaaaaccagtgtg

SEQ ID NO: 70629 - DNA, 22 bp, Artificial Sequence
  chemically synthesized
tgctcctggaaaaccagtgtga

SEQ ID NO: 70630 - DNA, 22 bp, Artificial Sequence
  chemically synthesized
gctcctggaaaaccagtgtgat

SEQ ID NO: 70631 - DNA, 22 bp, Artificial Sequence
  chemically synthesized
ctcctggaaaaccagtgtgatc

SEQ ID NO: 70632 - DNA, 22 bp, Artificial Sequence
  chemically synthesized
ctggaaaaccagtgtgatccgt

SEQ ID NO: 70633 - DNA, 22 bp, Artificial Sequence
  chemically synthesized
gaaaaccagtgtgatccgtata

SEQ ID NO: 70634 - DNA, 22 bp, Artificial Sequence
  chemically synthesized
ggagtttctttggatacatggc

SEQ ID NO: 70635 - DNA, 22 bp, Artificial Sequence
  chemically synthesized
gagtttctttggatacatggcc

SEQ ID NO: 70636 - DNA, 22 bp, Artificial Sequence
  chemically synthesized
ctttggatacatggcccccact

SEQ ID NO: 70637 - DNA, 22 bp, Artificial Sequence
  chemically synthesized
tttggatacatggcccccactc

SEQ ID NO: 70638 - DNA, 22 bp, Artificial Sequence
  chemically synthesized
tggatacatggcccccactctg

SEQ ID NO: 70639 - DNA, 22 bp, Artificial Sequence
  chemically synthesized
ggatacatggcccccactctgg

SEQ ID NO: 70640 - DNA, 22 bp, Artificial Sequence
  chemically synthesized
gatacatggcccccactctggg

SEQ ID NO: 70641 - DNA, 22 bp, Artificial Sequence
  chemically synthesized
tggggttgttggaggcctttgg

SEQ ID NO: 70642 - DNA, 22 bp, Artificial Sequence
  chemically synthesized
gggttgttggaggcctttggag

SEQ ID NO: 70643 - DNA, 22 bp, Artificial Sequence
  chemically synthesized
ttggaggcctttggagactgct

SEQ ID NO: 70644 - DNA, 22 bp, Artificial Sequence
  chemically synthesized
gaggcctttggagactgctggg

SEQ ID NO: 70645 - DNA, 22 bp, Artificial Sequence
  chemically synthesized
tggagactgctgggggtggagg

SEQ ID NO: 70646 - DNA, 22 bp, Artificial Sequence
  chemically synthesized
ggagactgctgggggtggaggg

SEQ ID NO: 70647 - DNA, 22 bp, Artificial Sequence
  chemically synthesized
gagactgctgggggtggagggg

SEQ ID NO: 70648 - DNA, 22 bp, Artificial Sequence
  chemically synthesized
ctgggggtggaggggaggggag

SEQ ID NO: 70649 - DNA, 22 bp, Artificial Sequence
  chemically synthesized
ggggtggaggggaggggaggta

SEQ ID NO: 70650 - DNA, 22 bp, Artificial Sequence
  chemically synthesized
aggctagtggggccccacttga

SEQ ID NO: 70651 - DNA, 22 bp, Artificial Sequence
  chemically synthesized
gtggggccccacttgattgcaa

SEQ ID NO: 70652 - DNA, 22 bp, Artificial Sequence
  chemically synthesized
gattgcaatccctttaaaagcc

SEQ ID NO: 70653 - DNA, 22 bp, Artificial Sequence
  chemically synthesized
attgcaatccctttaaaagcct

SEQ ID NO: 70654 - DNA, 22 bp, Artificial Sequence
  chemically synthesized
caatccctttaaaagcctaaat

SEQ ID NO: 70655 - DNA, 22 bp, Artificial Sequence
  chemically synthesized
taaaagcctaaatcagattgca

SEQ ID NO: 70656 - DNA, 22 bp, Artificial Sequence
  chemically synthesized
aaaagcctaaatcagattgcat

SEQ ID NO: 70657 - DNA, 22 bp, Artificial Sequence
  chemically synthesized
aaagcctaaatcagattgcatc

SEQ ID NO: 70658 - DNA, 22 bp, Artificial Sequence
  chemically synthesized
aatcagattgcatcgcccgctg

SEQ ID NO: 70659 - DNA, 22 bp, Artificial Sequence
  chemically synthesized
catcgcccgctgtgcaacccgc

SEQ ID NO: 70660 - DNA, 22 bp, Artificial Sequence
  chemically synthesized
tgcaacccgcaaacctgcttgg

SEQ ID NO: 70661 - DNA, 22 bp, Artificial Sequence
  chemically synthesized
cttgggagctggcgtacgtgcc

SEQ ID NO: 70662 - DNA, 22 bp, Artificial Sequence
  chemically synthesized
gggagctggcgtacgtgccgta

SEQ ID NO: 70663 - DNA, 22 bp, Artificial Sequence
  chemically synthesized
ggagctggcgtacgtgccgtag

SEQ ID NO: 70664 - DNA, 22 bp, Artificial Sequence
  chemically synthesized
gcgtacgtgccgtagatacttg

SEQ ID NO: 70665 - DNA, 22 bp, Artificial Sequence
  chemically synthesized
gcagagtgaatggatgagtgca

SEQ ID NO: 70666 - DNA, 22 bp, Artificial Sequence
  chemically synthesized
cagagtgaatggatgagtgcat

SEQ ID NO: 70667 - DNA, 22 bp, Artificial Sequence
  chemically synthesized
ttgccccttctgtcattcacca

SEQ ID NO: 70668 - DNA, 22 bp, Artificial Sequence
  chemically synthesized
tgccccttctgtcattcaccag

SEQ ID NO: 70669 - DNA, 22 bp, Artificial Sequence
  chemically synthesized
gccccttctgtcattcaccagt

SEQ ID NO: 70670 - DNA, 22 bp, Artificial Sequence
  chemically synthesized
ccccttctgtcattcaccagtc

SEQ ID NO: 70671 - DNA, 22 bp, Artificial Sequence
  chemically synthesized
ctgtcattcaccagtcccattt

SEQ ID NO: 70672 - DNA, 22 bp, Artificial Sequence
  chemically synthesized
tgtcattcaccagtcccattta

SEQ ID NO: 70673 - DNA, 22 bp, Artificial Sequence
  chemically synthesized
tcattcaccagtcccatttatg

SEQ ID NO: 70674 - DNA, 22 bp, Artificial Sequence
  chemically synthesized
accagtcccatttatgcctcca

SEQ ID NO: 70675 - DNA, 22 bp, Artificial Sequence
  chemically synthesized
atgcctccaccttggggctcta

SEQ ID NO: 70676 - DNA, 22 bp, Artificial Sequence
  chemically synthesized
tgcctccaccttggggctctac

SEQ ID NO: 70677 - DNA, 22 bp, Artificial Sequence
  chemically synthesized
caccttggggctctaccaggcg

SEQ ID NO: 70678 - DNA, 22 bp, Artificial Sequence
  chemically synthesized
ggggctctaccaggcgagtgac

SEQ ID NO: 70679 - DNA, 22 bp, Artificial Sequence
  chemically synthesized
gggctctaccaggcgagtgacc

SEQ ID NO: 70680 - DNA, 22 bp, Artificial Sequence
  chemically synthesized
taccaggcgagtgacccacagg

SEQ ID NO: 70681 - DNA, 22 bp, Artificial Sequence
  chemically synthesized
ccaggcgagtgacccacaggat

SEQ ID NO: 70682 - DNA, 22 bp, Artificial Sequence
  chemically synthesized
cagcacacacattcagaccagg

SEQ ID NO: 70683 - DNA, 22 bp, Artificial Sequence
  chemically synthesized
agaccagggaacccacttactg

SEQ ID NO: 70684 - DNA, 22 bp, Artificial Sequence
  chemically synthesized
actggctgtgaggcctcaggtg

SEQ ID NO: 70685 - DNA, 22 bp, Artificial Sequence
  chemically synthesized
ctggctgtgaggcctcaggtga

SEQ ID NO: 70686 - DNA, 22 bp, Artificial Sequence
  chemically synthesized
gctgtgaggcctcaggtgagtt

SEQ ID NO: 70687 - DNA, 22 bp, Artificial Sequence
  chemically synthesized
tgaggcctcaggtgagttgttt

SEQ ID NO: 70688 - DNA, 22 bp, Artificial Sequence
  chemically synthesized
aggtgagttgtttaaccgctcc

SEQ ID NO: 70689 - DNA, 22 bp, Artificial Sequence
  chemically synthesized
tttaaccgctccgagcctcaat

SEQ ID NO: 70690 - DNA, 22 bp, Artificial Sequence
  chemically synthesized
aaccgctccgagcctcaatttc

SEQ ID NO: 70691 - DNA, 22 bp, Artificial Sequence
  chemically synthesized
accgctccgagcctcaatttcc

SEQ ID NO: 70692 - DNA, 22 bp, Artificial Sequence
  chemically synthesized
cgagcctcaatttccctatctg

SEQ ID NO: 70693 - DNA, 22 bp, Artificial Sequence
  chemically synthesized
aatttccctatctgtaaaatgg

SEQ ID NO: 70694 - DNA, 22 bp, Artificial Sequence
  chemically synthesized
ccctatctgtaaaatggggatg

SEQ ID NO: 70695 - DNA, 22 bp, Artificial Sequence
  chemically synthesized
cctatctgtaaaatggggatgg

SEQ ID NO: 70696 - DNA, 22 bp, Artificial Sequence
  chemically synthesized
tctgtaaaatggggatggtgac

SEQ ID NO: 70697 - DNA, 22 bp, Artificial Sequence
  chemically synthesized
taaaatggggatggtgacggta

SEQ ID NO: 70698 - DNA, 22 bp, Artificial Sequence
  chemically synthesized
gttgagctgctgtgaggattaa

SEQ ID NO: 70699 - DNA, 22 bp, Artificial Sequence
  chemically synthesized
ttgagctgctgtgaggattaaa

SEQ ID NO: 70700 - DNA, 22 bp, Artificial Sequence
  chemically synthesized
agctgctgtgaggattaaaatg

SEQ ID NO: 70701 - DNA, 22 bp, Artificial Sequence
  chemically synthesized
ctgtgaggattaaaatgcaaca

SEQ ID NO: 70702 - DNA, 22 bp, Artificial Sequence
  chemically synthesized
tgaggattaaaatgcaacagtt

SEQ ID NO: 70703 - DNA, 22 bp, Artificial Sequence
  chemically synthesized
aaatgcaacagttcaaggaaag

SEQ ID NO: 70704 - DNA, 22 bp, Artificial Sequence
  chemically synthesized
aaggaaagctcagagacgggta

SEQ ID NO: 70705 - DNA, 22 bp, Artificial Sequence
  chemically synthesized
agagacgggtactgggtgtgcc

SEQ ID NO: 70706 - DNA, 22 bp, Artificial Sequence
  chemically synthesized
ggtgtgcccagaaagcccctcc

SEQ ID NO: 70707 - DNA, 22 bp, Artificial Sequence
  chemically synthesized
ctgatgctgccctccctccccc

SEQ ID NO: 70708 - DNA, 22 bp, Artificial Sequence
  chemically synthesized
atgctgccctccctcccccgtg

SEQ ID NO: 70709 - DNA, 22 bp, Artificial Sequence
  chemically synthesized
ccctccctcccccgtgtcaggg

SEQ ID NO: 70710 - DNA, 22 bp, Artificial Sequence
  chemically synthesized
cctcccccgtgtcaggggctgg

SEQ ID NO: 70711 - DNA, 22 bp, Artificial Sequence
  chemically synthesized
ccccgtgtcaggggctggtgtc

SEQ ID NO: 70712 - DNA, 22 bp, Artificial Sequence
  chemically synthesized
gtgtcactggggtggggtgggc

SEQ ID NO: 70713 - DNA, 22 bp, Artificial Sequence
  chemically synthesized
gggtggggtgggccacacttga

SEQ ID NO: 70714 - DNA, 22 bp, Artificial Sequence
  chemically synthesized
gaagagctttcctccaggcagt

SEQ ID NO: 70715 - DNA, 22 bp, Artificial Sequence
  chemically synthesized
aagagctttcctccaggcagtc

SEQ ID NO: 70716 - DNA, 22 bp, Artificial Sequence
  chemically synthesized
tcctccaggcagtctctcattc

SEQ ID NO: 70717 - DNA, 22 bp, Artificial Sequence
  chemically synthesized
cctccaggcagtctctcattca

SEQ ID NO: 70718 - DNA, 22 bp, Artificial Sequence
  chemically synthesized
ctccaggcagtctctcattcag

SEQ ID NO: 70719 - DNA, 22 bp, Artificial Sequence
  chemically synthesized
caggcagtctctcattcagtta

SEQ ID NO: 70720 - DNA, 22 bp, Artificial Sequence
  chemically synthesized
tcattcagttaccctgtgaagg

SEQ ID NO: 70721 - DNA, 22 bp, Artificial Sequence
  chemically synthesized
attcagttaccctgtgaaggga

SEQ ID NO: 70722 - DNA, 22 bp, Artificial Sequence
  chemically synthesized
agttaccctgtgaagggagtag

SEQ ID NO: 70723 - DNA, 22 bp, Artificial Sequence
  chemically synthesized
ccctgtgaagggagtaggtacc

SEQ ID NO: 70724 - DNA, 22 bp, Artificial Sequence
  chemically synthesized
tgaagggagtaggtaccaccct

SEQ ID NO: 70725 - DNA, 22 bp, Artificial Sequence
  chemically synthesized
ctttcaggcagcgggaaactga

SEQ ID NO: 70726 - DNA, 22 bp, Artificial Sequence
  chemically synthesized
tcaggcagcgggaaactgagct

SEQ ID NO: 70727 - DNA, 22 bp, Artificial Sequence
  chemically synthesized
caggcagcgggaaactgagctc

SEQ ID NO: 70728 - DNA, 22 bp, Artificial Sequence
  chemically synthesized
aggcagcgggaaactgagctca

SEQ ID NO: 70729 - DNA, 22 bp, Artificial Sequence
  chemically synthesized
agctcagactcccctccccttc

SEQ ID NO: 70730 - DNA, 22 bp, Artificial Sequence
  chemically synthesized
agactcccctccccttctctct

SEQ ID NO: 70731 - DNA, 22 bp, Artificial Sequence
  chemically synthesized
ccctccccttctctctgagctc

SEQ ID NO: 70732 - DNA, 22 bp, Artificial Sequence
  chemically synthesized
cccttctctctgagctcccttc

SEQ ID NO: 70733 - DNA, 22 bp, Artificial Sequence
  chemically synthesized
ctctctgagctcccttccctgc

SEQ ID NO: 70734 - DNA, 22 bp, Artificial Sequence
  chemically synthesized
tctctgagctcccttccctgca

SEQ ID NO: 70735 - DNA, 22 bp, Artificial Sequence
  chemically synthesized
tctgagctcccttccctgcagc

SEQ ID NO: 70736 - DNA, 22 bp, Artificial Sequence
  chemically synthesized
tgagctcccttccctgcagctc

SEQ ID NO: 70737 - DNA, 22 bp, Artificial Sequence
  chemically synthesized
agctcccttccctgcagctcca

SEQ ID NO: 70738 - DNA, 22 bp, Artificial Sequence
  chemically synthesized
ccttccctgcagctccatcccc

SEQ ID NO: 70739 - DNA, 22 bp, Artificial Sequence
  chemically synthesized
ccctgcagctccatcccctggc

SEQ ID NO: 70740 - DNA, 22 bp, Artificial Sequence
  chemically synthesized
cctgcagctccatcccctggct

SEQ ID NO: 70741 - DNA, 22 bp, Artificial Sequence
  chemically synthesized
cagctccatcccctggcttcag

SEQ ID NO: 70742 - DNA, 22 bp, Artificial Sequence
  chemically synthesized
catcccctggcttcagggcccc

SEQ ID NO: 70743 - DNA, 22 bp, Artificial Sequence
  chemically synthesized
gcttcagggcccctgtccttcc

SEQ ID NO: 70744 - DNA, 22 bp, Artificial Sequence
  chemically synthesized
cagggcccctgtccttcccctg

SEQ ID NO: 70745 - DNA, 22 bp, Artificial Sequence
  chemically synthesized
agggcccctgtccttcccctga

SEQ ID NO: 70746 - DNA, 22 bp, Artificial Sequence
  chemically synthesized
tccttcccctgagctggctgaa

SEQ ID NO: 70747 - DNA, 22 bp, Artificial Sequence
  chemically synthesized
cccctgagctggctgaatggat

SEQ ID NO: 70748 - DNA, 22 bp, Artificial Sequence
  chemically synthesized
ccctgagctggctgaatggata

SEQ ID NO: 70749 - DNA, 22 bp, Artificial Sequence
  chemically synthesized
agctggctgaatggatattccg

SEQ ID NO: 70750 - DNA, 22 bp, Artificial Sequence
  chemically synthesized
gctgaatggatattccgctgct

SEQ ID NO: 70751 - DNA, 22 bp, Artificial Sequence
  chemically synthesized
aatggatattccgctgctctac

SEQ ID NO: 70752 - DNA, 22 bp, Artificial Sequence
  chemically synthesized
cgctgctctacatccactcaca

SEQ ID NO: 70753 - DNA, 22 bp, Artificial Sequence
  chemically synthesized
ctctacatccactcacagctcc

SEQ ID NO: 70754 - DNA, 22 bp, Artificial Sequence
  chemically synthesized
tacatccactcacagctccagc

SEQ ID NO: 70755 - DNA, 22 bp, Artificial Sequence
  chemically synthesized
catccactcacagctccagcac

SEQ ID NO: 70756 - DNA, 22 bp, Artificial Sequence
  chemically synthesized
acagctccagcactgggctgtg

SEQ ID NO: 70757 - DNA, 22 bp, Artificial Sequence
  chemically synthesized
cagcactgggctgtggttgagg

SEQ ID NO: 70758 - DNA, 22 bp, Artificial Sequence
  chemically synthesized
ggctgtggttgaggtcgcctgc

SEQ ID NO: 70759 - DNA, 22 bp, Artificial Sequence
  chemically synthesized
tggttgaggtcgcctgccctcg

SEQ ID NO: 70760 - DNA, 22 bp, Artificial Sequence
  chemically synthesized
aggtcgcctgccctcggtagct

SEQ ID NO: 70761 - DNA, 22 bp, Artificial Sequence
  chemically synthesized
ccctcggtagctcctgggcatt

SEQ ID NO: 70762 - DNA, 22 bp, Artificial Sequence
  chemically synthesized
ggtagctcctgggcatttcttc

SEQ ID NO: 70763 - DNA, 22 bp, Artificial Sequence
  chemically synthesized
ctgggcatttcttcccctctct

SEQ ID NO: 70764 - DNA, 22 bp, Artificial Sequence
  chemically synthesized
ggcatttcttcccctctctggg

SEQ ID NO: 70765 - DNA, 22 bp, Artificial Sequence
  chemically synthesized
cttcccctctctgggcctttgt

SEQ ID NO: 70766 - DNA, 22 bp, Artificial Sequence
  chemically synthesized
ttcccctctctgggcctttgtt

SEQ ID NO: 70767 - DNA, 22 bp, Artificial Sequence
  chemically synthesized
cccctctctgggcctttgtttt

SEQ ID NO: 70768 - DNA, 22 bp, Artificial Sequence
  chemically synthesized
ccctctctgggcctttgttttc

SEQ ID NO: 70769 - DNA, 22 bp, Artificial Sequence
  chemically synthesized
tctgggcctttgttttcccatc

SEQ ID NO: 70770 - DNA, 22 bp, Artificial Sequence
  chemically synthesized
tgggcctttgttttcccatctg

SEQ ID NO: 70771 - DNA, 22 bp, Artificial Sequence
  chemically synthesized
ggcctttgttttcccatctgca

SEQ ID NO: 70772 - DNA, 22 bp, Artificial Sequence
  chemically synthesized
tgttttcccatctgcacaatga

SEQ ID NO: 70773 - DNA, 22 bp, Artificial Sequence
  chemically synthesized
gttttcccatctgcacaatgac

SEQ ID NO: 70774 - DNA, 22 bp, Artificial Sequence
  chemically synthesized
ttttcccatctgcacaatgacc

SEQ ID NO: 70775 - DNA, 22 bp, Artificial Sequence
  chemically synthesized
tcccatctgcacaatgaccccc

SEQ ID NO: 70776 - DNA, 22 bp, Artificial Sequence
  chemically synthesized
cccatctgcacaatgaccccca

SEQ ID NO: 70777 - DNA, 22 bp, Artificial Sequence
  chemically synthesized
ccatctgcacaatgacccccac

SEQ ID NO: 70778 - DNA, 22 bp, Artificial Sequence
  chemically synthesized
cacaatgacccccactctaagc

SEQ ID NO: 70779 - DNA, 22 bp, Artificial Sequence
  chemically synthesized
taagccctgctgtccctcccac

SEQ ID NO: 70780 - DNA, 22 bp, Artificial Sequence
  chemically synthesized
agccctgctgtccctcccacct

SEQ ID NO: 70781 - DNA, 22 bp, Artificial Sequence
  chemically synthesized
ctgtccctcccacctgtggaac

SEQ ID NO: 70782 - DNA, 22 bp, Artificial Sequence
  chemically synthesized
tccctcccacctgtggaactga

SEQ ID NO: 70783 - DNA, 22 bp, Artificial Sequence
  chemically synthesized
ccacctgtggaactgagtgagc

SEQ ID NO: 70784 - DNA, 22 bp, Artificial Sequence
  chemically synthesized
tggaactgagtgagcagcagca

SEQ ID NO: 70785 - DNA, 22 bp, Artificial Sequence
  chemically synthesized
agtgagcagcagcagcaatgtc

SEQ ID NO: 70786 - DNA, 22 bp, Artificial Sequence
  chemically synthesized
tcctgctctcctcaagctctcc

SEQ ID NO: 70787 - DNA, 22 bp, Artificial Sequence
  chemically synthesized
cctgctctcctcaagctctcct

SEQ ID NO: 70788 - DNA, 22 bp, Artificial Sequence
  chemically synthesized
ctgctctcctcaagctctcctc

SEQ ID NO: 70789 - DNA, 22 bp, Artificial Sequence
  chemically synthesized
ctctcctcaagctctcctcaag

SEQ ID NO: 70790 - DNA, 22 bp, Artificial Sequence
  chemically synthesized
tcctcaagctctcctcaagctc

SEQ ID NO: 70791 - DNA, 22 bp, Artificial Sequence
  chemically synthesized
ctcaagctctcctcaagctctg

SEQ ID NO: 70792 - DNA, 22 bp, Artificial Sequence
  chemically synthesized
aagctctcctcaagctctgtct

SEQ ID NO: 70793 - DNA, 22 bp, Artificial Sequence
  chemically synthesized
tcctcaagctctgtctcttctg

SEQ ID NO: 70794 - DNA, 22 bp, Artificial Sequence
  chemically synthesized
ctcaagctctgtctcttctggc

SEQ ID NO: 70795 - DNA, 22 bp, Artificial Sequence
  chemically synthesized
aagctctgtctcttctggcagg

SEQ ID NO: 70796 - DNA, 22 bp, Artificial Sequence
  chemically synthesized
tgtctcttctggcaggcacagg

SEQ ID NO: 70797 - DNA, 22 bp, Artificial Sequence
  chemically synthesized
tctcttctggcaggcacaggag

SEQ ID NO: 70798 - DNA, 22 bp, Artificial Sequence
  chemically synthesized
ttctggcaggcacaggagagtg

SEQ ID NO: 70799 - DNA, 22 bp, Artificial Sequence
  chemically synthesized
ctggcaggcacaggagagtggc

SEQ ID NO: 70800 - DNA, 22 bp, Artificial Sequence
  chemically synthesized
tggcaggcacaggagagtggcc

SEQ ID NO: 70801 - DNA, 22 bp, Artificial Sequence
  chemically synthesized
gcaggcacaggagagtggcctg

SEQ ID NO: 70802 - DNA, 22 bp, Artificial Sequence
  chemically synthesized
aaggctggcaggaggttgccgc

SEQ ID NO: 70803 - DNA, 22 bp, Artificial Sequence
  chemically synthesized
gcaggaggttgccgcccctcca

SEQ ID NO: 70804 - DNA, 22 bp, Artificial Sequence
  chemically synthesized
ccgcccctccaacctggaattc

SEQ ID NO: 70805 - DNA, 22 bp, Artificial Sequence
  chemically synthesized
caacctggaattcctggcagca

SEQ ID NO: 70806 - DNA, 22 bp, Artificial Sequence
  chemically synthesized
gaattcctggcagcagcagcgg

SEQ ID NO: 70807 - DNA, 22 bp, Artificial Sequence
  chemically synthesized
ctggcagcagcagcggctaggc

SEQ ID NO: 70808 - DNA, 22 bp, Artificial Sequence
  chemically synthesized
gcagcagcagcggctaggcctt

SEQ ID NO: 70809 - DNA, 22 bp, Artificial Sequence
  chemically synthesized
ggccttcctcggaggcccgacc

SEQ ID NO: 70810 - DNA, 22 bp, Artificial Sequence
  chemically synthesized
cctcggaggcccgaccccctcc

SEQ ID NO: 70811 - DNA, 22 bp, Artificial Sequence
  chemically synthesized
ctcggaggcccgaccccctcct

SEQ ID NO: 70812 - DNA, 22 bp, Artificial Sequence
  chemically synthesized
ggaggcccgaccccctcctcct

SEQ ID NO: 70813 - DNA, 22 bp, Artificial Sequence
  chemically synthesized
ctccttcttggttcagctcagg

SEQ ID NO: 70814 - DNA, 22 bp, Artificial Sequence
  chemically synthesized
cttcttggttcagctcaggact

SEQ ID NO: 70815 - DNA, 22 bp, Artificial Sequence
  chemically synthesized
cttggttcagctcaggactctg

SEQ ID NO: 70816 - DNA, 22 bp, Artificial Sequence
  chemically synthesized
ttggttcagctcaggactctga

SEQ ID NO: 70817 - DNA, 22 bp, Artificial Sequence
  chemically synthesized
ggttcagctcaggactctgagg

SEQ ID NO: 70818 - DNA, 22 bp, Artificial Sequence
  chemically synthesized
gttcagctcaggactctgaggg

SEQ ID NO: 70819 - DNA, 22 bp, Artificial Sequence
  chemically synthesized
agctcaggactctgagggttgc

SEQ ID NO: 70820 - DNA, 22 bp, Artificial Sequence
  chemically synthesized
aggactctgagggttgctgcgt

SEQ ID NO: 70821 - DNA, 22 bp, Artificial Sequence
  chemically synthesized
tgagggttgctgcgtggaggca

SEQ ID NO: 70822 - DNA, 22 bp, Artificial Sequence
  chemically synthesized
agggttgctgcgtggaggcagt

SEQ ID NO: 70823 - DNA, 22 bp, Artificial Sequence
  chemically synthesized
ctgcgtggaggcagtgcatgcc

SEQ ID NO: 70824 - DNA, 22 bp, Artificial Sequence
  chemically synthesized
cgtggaggcagtgcatgccctg

SEQ ID NO: 70825 - DNA, 22 bp, Artificial Sequence
  chemically synthesized
ggcacagtgcccagttcctgcc

SEQ ID NO: 70826 - DNA, 22 bp, Artificial Sequence
  chemically synthesized
ctgcccacccaggaagtagact

SEQ ID NO: 70827 - DNA, 22 bp, Artificial Sequence
  chemically synthesized
cccacccaggaagtagacttcg

SEQ ID NO: 70828 - DNA, 22 bp, Artificial Sequence
  chemically synthesized
cgggtggaggcagtaggctggg

SEQ ID NO: 70829 - DNA, 22 bp, Artificial Sequence
  chemically synthesized
gggtggaggcagtaggctgggg

SEQ ID NO: 70830 - DNA, 22 bp, Artificial Sequence
  chemically synthesized
gggaggggcggggagcttggac

SEQ ID NO: 70831 - DNA, 22 bp, Artificial Sequence
  chemically synthesized
ggacaggaaggagccttgctca

SEQ ID NO: 70832 - DNA, 22 bp, Artificial Sequence
  chemically synthesized
gacaggaaggagccttgctcat

SEQ ID NO: 70833 - DNA, 22 bp, Artificial Sequence
  chemically synthesized
gctcattgcccggcagacacaa

SEQ ID NO: 70834 - DNA, 22 bp, Artificial Sequence
  chemically synthesized
ctcattgcccggcagacacaag

SEQ ID NO: 70835 - DNA, 22 bp, Artificial Sequence
  chemically synthesized
attgcccggcagacacaagact

SEQ ID NO: 70836 - DNA, 22 bp, Artificial Sequence
  chemically synthesized
cccggcagacacaagactgggc

SEQ ID NO: 70837 - DNA, 22 bp, Artificial Sequence
  chemically synthesized
ggccctcataaactcagacagc

SEQ ID NO: 70838 - DNA, 22 bp, Artificial Sequence
  chemically synthesized
ataaactcagacagcccggcat

SEQ ID NO: 70839 - DNA, 22 bp, Artificial Sequence
  chemically synthesized
agacagcccggcatgtcacctg

SEQ ID NO: 70840 - DNA, 22 bp, Artificial Sequence
  chemically synthesized
ttgtacctgccctttcagctct

SEQ ID NO: 70841 - DNA, 22 bp, Artificial Sequence
  chemically synthesized
tacctgccctttcagctctgtg

SEQ ID NO: 70842 - DNA, 22 bp, Artificial Sequence
  chemically synthesized
ccctttcagctctgtgacccgg

SEQ ID NO: 70843 - DNA, 22 bp, Artificial Sequence
  chemically synthesized
tcagctctgtgacccgggacaa

SEQ ID NO: 70844 - DNA, 22 bp, Artificial Sequence
  chemically synthesized
cagctctgtgacccgggacaag

SEQ ID NO: 70845 - DNA, 22 bp, Artificial Sequence
  chemically synthesized
agctctgtgacccgggacaagt

SEQ ID NO: 70846 - DNA, 22 bp, Artificial Sequence
  chemically synthesized
tgtgacccgggacaagtcaccc

SEQ ID NO: 70847 - DNA, 22 bp, Artificial Sequence
  chemically synthesized
tgacccgggacaagtcaccctc

SEQ ID NO: 70848 - DNA, 22 bp, Artificial Sequence
  chemically synthesized
tccctttgagttgccgcaagag

SEQ ID NO: 70849 - DNA, 22 bp, Artificial Sequence
  chemically synthesized
cctttgagttgccgcaagaggt

SEQ ID NO: 70850 - DNA, 22 bp, Artificial Sequence
  chemically synthesized
tgagttgccgcaagaggtacag

SEQ ID NO: 70851 - DNA, 22 bp, Artificial Sequence
  chemically synthesized
gagttgccgcaagaggtacagt

SEQ ID NO: 70852 - DNA, 22 bp, Artificial Sequence
  chemically synthesized
agttgccgcaagaggtacagtc

SEQ ID NO: 70853 - DNA, 22 bp, Artificial Sequence
  chemically synthesized
ccgcaagaggtacagtcacact

SEQ ID NO: 70854 - DNA, 22 bp, Artificial Sequence
  chemically synthesized
cccagaggattactagaaatga

SEQ ID NO: 70855 - DNA, 22 bp, Artificial Sequence
  chemically synthesized
ctagaaatgacaggcctcgccc

SEQ ID NO: 70856 - DNA, 22 bp, Artificial Sequence
  chemically synthesized
gaaatgacaggcctcgccctcc

SEQ ID NO: 70857 - DNA, 22 bp, Artificial Sequence
  chemically synthesized
gccctcctggcacagacctggc

SEQ ID NO: 70858 - DNA, 22 bp, Artificial Sequence
  chemically synthesized
ctggcacagacctggcaccaat

SEQ ID NO: 70859 - DNA, 22 bp, Artificial Sequence
  chemically synthesized
gcacagacctggcaccaataac

SEQ ID NO: 70860 - DNA, 22 bp, Artificial Sequence
  chemically synthesized
gcaccaataactggcaggtttc

SEQ ID NO: 70861 - DNA, 22 bp, Artificial Sequence
  chemically synthesized
gcaggtttctggggccagctgc

SEQ ID NO: 70862 - DNA, 22 bp, Artificial Sequence
  chemically synthesized
ctggggccagctgcagagggaa

SEQ ID NO: 70863 - DNA, 22 bp, Artificial Sequence
  chemically synthesized
tggggccagctgcagagggaag

SEQ ID NO: 70864 - DNA, 22 bp, Artificial Sequence
  chemically synthesized
gggccagctgcagagggaagag

SEQ ID NO: 70865 - DNA, 22 bp, Artificial Sequence
  chemically synthesized
cagagggaagaggactgagcca

SEQ ID NO: 70866 - DNA, 22 bp, Artificial Sequence
  chemically synthesized
agccacctatgaaatgcccagt

SEQ ID NO: 70867 - DNA, 22 bp, Artificial Sequence
  chemically synthesized
tgaaatgcccagtgggcagccc

SEQ ID NO: 70868 - DNA, 22 bp, Artificial Sequence
  chemically synthesized
ggcaggtctgtgtgcactgggg

SEQ ID NO: 70869 - DNA, 22 bp, Artificial Sequence
  chemically synthesized
tgtgcactggggaggtgtgtgt

SEQ ID NO: 70870 - DNA, 22 bp, Artificial Sequence
  chemically synthesized
gggaggtgtgtgtcataggacc

SEQ ID NO: 70871 - DNA, 22 bp, Artificial Sequence
  chemically synthesized
tgacacacacctccccagtgca

SEQ ID NO: 70872 - DNA, 22 bp, Artificial Sequence
  chemically synthesized
cccagtgcacacagacctgccc

SEQ ID NO: 70873 - DNA, 22 bp, Artificial Sequence
  chemically synthesized
cccaactgtggggctgcccact

SEQ ID NO: 70874 - DNA, 22 bp, Artificial Sequence
  chemically synthesized
tggggctgcccactgggcattt

SEQ ID NO: 70875 - DNA, 22 bp, Artificial Sequence
  chemically synthesized
cccactgggcatttcataggtg

SEQ ID NO: 70876 - DNA, 22 bp, Artificial Sequence
  chemically synthesized
ggcatttcataggtggctcagt

SEQ ID NO: 70877 - DNA, 22 bp, Artificial Sequence
  chemically synthesized
cataggtggctcagtcctcttc

SEQ ID NO: 70878 - DNA, 22 bp, Artificial Sequence
  chemically synthesized
ataggtggctcagtcctcttcc

SEQ ID NO: 70879 - DNA, 22 bp, Artificial Sequence
  chemically synthesized
agtcctcttccctctgcagctg

SEQ ID NO: 70880 - DNA, 22 bp, Artificial Sequence
  chemically synthesized
ttccctctgcagctggccccag

SEQ ID NO: 70881 - DNA, 22 bp, Artificial Sequence
  chemically synthesized
ccctctgcagctggccccagaa

SEQ ID NO: 70882 - DNA, 22 bp, Artificial Sequence
  chemically synthesized
cctctgcagctggccccagaaa

SEQ ID NO: 70883 - DNA, 22 bp, Artificial Sequence
  chemically synthesized
tgcagctggccccagaaacctg

SEQ ID NO: 70884 - DNA, 22 bp, Artificial Sequence
  chemically synthesized
cagctggccccagaaacctgcc

SEQ ID NO: 70885 - DNA, 22 bp, Artificial Sequence
  chemically synthesized
gccccagaaacctgccagttat

SEQ ID NO: 70886 - DNA, 22 bp, Artificial Sequence
  chemically synthesized
ccagttattggtgccaggtctg

SEQ ID NO: 70887 - DNA, 22 bp, Artificial Sequence
  chemically synthesized
ttggtgccaggtctgtgccagg

SEQ ID NO: 70888 - DNA, 22 bp, Artificial Sequence
  chemically synthesized
gtgccaggtctgtgccaggagg

SEQ ID NO: 70889 - DNA, 22 bp, Artificial Sequence
  chemically synthesized
tgccaggagggcgaggcctgtc

SEQ ID NO: 70890 - DNA, 22 bp, Artificial Sequence
  chemically synthesized
tcatttctagtaatcctctggg

SEQ ID NO: 70891 - DNA, 22 bp, Artificial Sequence
  chemically synthesized
ctagtaatcctctgggcagtgt

SEQ ID NO: 70892 - DNA, 22 bp, Artificial Sequence
  chemically synthesized
tagtaatcctctgggcagtgtg

SEQ ID NO: 70893 - DNA, 22 bp, Artificial Sequence
  chemically synthesized
gtaatcctctgggcagtgtgac

SEQ ID NO: 70894 - DNA, 22 bp, Artificial Sequence
  chemically synthesized
tgggcagtgtgactgtacctct

SEQ ID NO: 70895 - DNA, 22 bp, Artificial Sequence
  chemically synthesized
ggcagtgtgactgtacctcttg

SEQ ID NO: 70896 - DNA, 22 bp, Artificial Sequence
  chemically synthesized
tacctcttgcggcaactcaaag

SEQ ID NO: 70897 - DNA, 22 bp, Artificial Sequence
  chemically synthesized
ttgcggcaactcaaagggagag

SEQ ID NO: 70898 - DNA, 22 bp, Artificial Sequence
  chemically synthesized
gcggcaactcaaagggagaggg

SEQ ID NO: 70899 - DNA, 22 bp, Artificial Sequence
  chemically synthesized
cggcaactcaaagggagagggt

SEQ ID NO: 70900 - DNA, 22 bp, Artificial Sequence
  chemically synthesized
aaagggagagggtgacttgtcc

SEQ ID NO: 70901 - DNA, 22 bp, Artificial Sequence
  chemically synthesized
gtcccgggtcacagagctgaaa

SEQ ID NO: 70902 - DNA, 22 bp, Artificial Sequence
  chemically synthesized
tcccgggtcacagagctgaaag

SEQ ID NO: 70903 - DNA, 22 bp, Artificial Sequence
  chemically synthesized
aaagggcaggtacaacaggtga

SEQ ID NO: 70904 - DNA, 22 bp, Artificial Sequence
  chemically synthesized
tctgagtttatgagggcccagt

SEQ ID NO: 70905 - DNA, 22 bp, Artificial Sequence
  chemically synthesized
agtttatgagggcccagtcttg

SEQ ID NO: 70906 - DNA, 22 bp, Artificial Sequence
  chemically synthesized
atgagggcccagtcttgtgtct

SEQ ID NO: 70907 - DNA, 22 bp, Artificial Sequence
  chemically synthesized
tgagggcccagtcttgtgtctg

SEQ ID NO: 70908 - DNA, 22 bp, Artificial Sequence
  chemically synthesized
gtgtctgccgggcaatgagcaa

SEQ ID NO: 70909 - DNA, 22 bp, Artificial Sequence
  chemically synthesized
tgtctgccgggcaatgagcaag

SEQ ID NO: 70910 - DNA, 22 bp, Artificial Sequence
  chemically synthesized
ccgggcaatgagcaaggctcct

SEQ ID NO: 70911 - DNA, 22 bp, Artificial Sequence
  chemically synthesized
cttcctgtccaagctccccgcc

SEQ ID NO: 70912 - DNA, 22 bp, Artificial Sequence
  chemically synthesized
cctgtccaagctccccgcccct

SEQ ID NO: 70913 - DNA, 22 bp, Artificial Sequence
  chemically synthesized
ctgtccaagctccccgcccctc

SEQ ID NO: 70914 - DNA, 22 bp, Artificial Sequence
  chemically synthesized
tccaagctccccgcccctcccc

SEQ ID NO: 70915 - DNA, 22 bp, Artificial Sequence
  chemically synthesized
cccgcccctccccagcctactg

SEQ ID NO: 70916 - DNA, 22 bp, Artificial Sequence
  chemically synthesized
cccagcctactgcctccacccg

SEQ ID NO: 70917 - DNA, 22 bp, Artificial Sequence
  chemically synthesized
ctgcctccacccgaagtctact

SEQ ID NO: 70918 - DNA, 22 bp, Artificial Sequence
  chemically synthesized
cctccacccgaagtctacttcc

SEQ ID NO: 70919 - DNA, 22 bp, Artificial Sequence
  chemically synthesized
cacccgaagtctacttcctggg

SEQ ID NO: 70920 - DNA, 22 bp, Artificial Sequence
  chemically synthesized
cttcctgggtgggcaggaactg

SEQ ID NO: 70921 - DNA, 22 bp, Artificial Sequence
  chemically synthesized
cctgggtgggcaggaactgggc

SEQ ID NO: 70922 - DNA, 22 bp, Artificial Sequence
  chemically synthesized
ctgggtgggcaggaactgggca

SEQ ID NO: 70923 - DNA, 22 bp, Artificial Sequence
  chemically synthesized
ggtgggcaggaactgggcactg

SEQ ID NO: 70924 - DNA, 22 bp, Artificial Sequence
  chemically synthesized
ggcactgtgcccagggcatgca

SEQ ID NO: 70925 - DNA, 22 bp, Artificial Sequence
  chemically synthesized
tgcccagggcatgcactgcctc

SEQ ID NO: 70926 - DNA, 22 bp, Artificial Sequence
  chemically synthesized
cctccacgcagcaaccctcaga

SEQ ID NO: 70927 - DNA, 22 bp, Artificial Sequence
  chemically synthesized
cacgcagcaaccctcagagtcc

SEQ ID NO: 70928 - DNA, 22 bp, Artificial Sequence
  chemically synthesized
agagtcctgagctgaaccaaga

SEQ ID NO: 70929 - DNA, 22 bp, Artificial Sequence
  chemically synthesized
agctgaaccaagaaggaggagg

SEQ ID NO: 70930 - DNA, 22 bp, Artificial Sequence
  chemically synthesized
aaccaagaaggaggagggggtc

SEQ ID NO: 70931 - DNA, 22 bp, Artificial Sequence
  chemically synthesized
cgaggaaggcctagccgctgct

SEQ ID NO: 70932 - DNA, 22 bp, Artificial Sequence
  chemically synthesized
gccgctgctgctgccaggaatt

SEQ ID NO: 70933 - DNA, 22 bp, Artificial Sequence
  chemically synthesized
ctgctgccaggaattccaggtt

SEQ ID NO: 70934 - DNA, 22 bp, Artificial Sequence
  chemically synthesized
ctgccaggaattccaggttgga

SEQ ID NO: 70935 - DNA, 22 bp, Artificial Sequence
  chemically synthesized
ccaggaattccaggttggaggg

SEQ ID NO: 70936 - DNA, 22 bp, Artificial Sequence
  chemically synthesized
caggttggaggggcggcaacct

SEQ ID NO: 70937 - DNA, 22 bp, Artificial Sequence
  chemically synthesized
gaggggcggcaacctcctgcca

SEQ ID NO: 70938 - DNA, 22 bp, Artificial Sequence
  chemically synthesized
ctgccagccttcaggccactct

SEQ ID NO: 70939 - DNA, 22 bp, Artificial Sequence
  chemically synthesized
ccagccttcaggccactctcct

SEQ ID NO: 70940 - DNA, 22 bp, Artificial Sequence
  chemically synthesized
caggccactctcctgtgcctgc

SEQ ID NO: 70941 - DNA, 22 bp, Artificial Sequence
  chemically synthesized
aggccactctcctgtgcctgcc

SEQ ID NO: 70942 - DNA, 22 bp, Artificial Sequence
  chemically synthesized
tcctgtgcctgccagaagagac

SEQ ID NO: 70943 - DNA, 22 bp, Artificial Sequence
  chemically synthesized
ctgtgcctgccagaagagacag

SEQ ID NO: 70944 - DNA, 22 bp, Artificial Sequence
  chemically synthesized
tgcctgccagaagagacagagc

SEQ ID NO: 70945 - DNA, 22 bp, Artificial Sequence
  chemically synthesized
ccagaagagacagagcttgagg

SEQ ID NO: 70946 - DNA, 22 bp, Artificial Sequence
  chemically synthesized
gaggagagcttgaggagagcag

SEQ ID NO: 70947 - DNA, 22 bp, Artificial Sequence
  chemically synthesized
aggagagcttgaggagagcagg

SEQ ID NO: 70948 - DNA, 22 bp, Artificial Sequence
  chemically synthesized
gaggagagcaggaaaggtggga

SEQ ID NO: 70949 - DNA, 22 bp, Artificial Sequence
  chemically synthesized
aggagagcaggaaaggtgggac

SEQ ID NO: 70950 - DNA, 22 bp, Artificial Sequence
  chemically synthesized
ctgctgctgctcactcagttcc

SEQ ID NO: 70951 - DNA, 22 bp, Artificial Sequence
  chemically synthesized
ctgctgctcactcagttccaca

SEQ ID NO: 70952 - DNA, 22 bp, Artificial Sequence
  chemically synthesized
ctgctcactcagttccacaggt

SEQ ID NO: 70953 - DNA, 22 bp, Artificial Sequence
  chemically synthesized
ctcactcagttccacaggtggg

SEQ ID NO: 70954 - DNA, 22 bp, Artificial Sequence
  chemically synthesized
actcagttccacaggtgggagg

SEQ ID NO: 70955 - DNA, 22 bp, Artificial Sequence
  chemically synthesized
agttccacaggtgggagggaca

SEQ ID NO: 70956 - DNA, 22 bp, Artificial Sequence
  chemically synthesized
cacaggtgggagggacagcagg

SEQ ID NO: 70957 - DNA, 22 bp, Artificial Sequence
  chemically synthesized
agagtgggggtcattgtgcaga

SEQ ID NO: 70958 - DNA, 22 bp, Artificial Sequence
  chemically synthesized
gagtgggggtcattgtgcagat

SEQ ID NO: 70959 - DNA, 22 bp, Artificial Sequence
  chemically synthesized
tgcagatgggaaaacaaaggcc

SEQ ID NO: 70960 - DNA, 22 bp, Artificial Sequence
  chemically synthesized
ccgagggcaggcgacctcaacc

SEQ ID NO: 70961 - DNA, 22 bp, Artificial Sequence
  chemically synthesized
aaccacagcccagtgctggagc

SEQ ID NO: 70962 - DNA, 22 bp, Artificial Sequence
  chemically synthesized
gagctgtgagtggatgtagagc

SEQ ID NO: 70963 - DNA, 22 bp, Artificial Sequence
  chemically synthesized
tgagtggatgtagagcagcgga

SEQ ID NO: 70964 - DNA, 22 bp, Artificial Sequence
  chemically synthesized
agccagctcaggggaaggacag

SEQ ID NO: 70965 - DNA, 22 bp, Artificial Sequence
  chemically synthesized
aggggaaggacaggggccctga

SEQ ID NO: 70966 - DNA, 22 bp, Artificial Sequence
  chemically synthesized
aagccaggggatggagctgcag

SEQ ID NO: 70967 - DNA, 22 bp, Artificial Sequence
  chemically synthesized
cagggaagggagctcagagaga

SEQ ID NO: 70968 - DNA, 22 bp, Artificial Sequence
  chemically synthesized
agagagaaggggaggggagtct

SEQ ID NO: 70969 - DNA, 22 bp, Artificial Sequence
  chemically synthesized
agctcagtttcccgctgcctga

SEQ ID NO: 70970 - DNA, 22 bp, Artificial Sequence
  chemically synthesized
agtttcccgctgcctgaaagga

SEQ ID NO: 70971 - DNA, 22 bp, Artificial Sequence
  chemically synthesized
cccgctgcctgaaaggagggtg

SEQ ID NO: 70972 - DNA, 22 bp, Artificial Sequence
  chemically synthesized
ccgctgcctgaaaggagggtgg

SEQ ID NO: 70973 - DNA, 22 bp, Artificial Sequence
  chemically synthesized
cctgaaaggagggtggtaccta

SEQ ID NO: 70974 - DNA, 22 bp, Artificial Sequence
  chemically synthesized
aaaggagggtggtacctactcc

SEQ ID NO: 70975 - DNA, 22 bp, Artificial Sequence
  chemically synthesized
ctcccttcacagggtaactgaa

SEQ ID NO: 70976 - DNA, 22 bp, Artificial Sequence
  chemically synthesized
ccttcacagggtaactgaatga

SEQ ID NO: 70977 - DNA, 22 bp, Artificial Sequence
  chemically synthesized
cacagggtaactgaatgagaga

SEQ ID NO: 70978 - DNA, 22 bp, Artificial Sequence
  chemically synthesized
acagggtaactgaatgagagac

SEQ ID NO: 70979 - DNA, 22 bp, Artificial Sequence
  chemically synthesized
aatgagagactgcctggaggaa

SEQ ID NO: 70980 - DNA, 22 bp, Artificial Sequence
  chemically synthesized
cctggaggaaagctcttcaagt

SEQ ID NO: 70981 - DNA, 22 bp, Artificial Sequence
  chemically synthesized
gaggaaagctcttcaagtgtgg

SEQ ID NO: 70982 - DNA, 22 bp, Artificial Sequence
  chemically synthesized
ttcaagtgtggcccaccccacc

SEQ ID NO: 70983 - DNA, 22 bp, Artificial Sequence
  chemically synthesized
caagtgtggcccaccccacccc

SEQ ID NO: 70984 - DNA, 22 bp, Artificial Sequence
  chemically synthesized
aagtgtggcccaccccacccca

SEQ ID NO: 70985 - DNA, 22 bp, Artificial Sequence
  chemically synthesized
acacgggggagggagggcagca

SEQ ID NO: 70986 - DNA, 22 bp, Artificial Sequence
  chemically synthesized
tctgggcacacccagtacccgt

SEQ ID NO: 70987 - DNA, 22 bp, Artificial Sequence
  chemically synthesized
ctgggcacacccagtacccgtc

SEQ ID NO: 70988 - DNA, 22 bp, Artificial Sequence
  chemically synthesized
tgggcacacccagtacccgtct

SEQ ID NO: 70989 - DNA, 22 bp, Artificial Sequence
  chemically synthesized
ggcacacccagtacccgtctct

SEQ ID NO: 70990 - DNA, 22 bp, Artificial Sequence
  chemically synthesized
tgagctttccttgaactgttgc

SEQ ID NO: 70991 - DNA, 22 bp, Artificial Sequence
  chemically synthesized
agctttccttgaactgttgcat

SEQ ID NO: 70992 - DNA, 22 bp, Artificial Sequence
  chemically synthesized
tccttgaactgttgcattttaa

SEQ ID NO: 70993 - DNA, 22 bp, Artificial Sequence
  chemically synthesized
ccttgaactgttgcattttaat

SEQ ID NO: 70994 - DNA, 22 bp, Artificial Sequence
  chemically synthesized
cttgaactgttgcattttaatc

SEQ ID NO: 70995 - DNA, 22 bp, Artificial Sequence
  chemically synthesized
gaactgttgcattttaatcctc

SEQ ID NO: 70996 - DNA, 22 bp, Artificial Sequence
  chemically synthesized
aactgttgcattttaatcctca

SEQ ID NO: 70997 - DNA, 22 bp, Artificial Sequence
  chemically synthesized
ttgcattttaatcctcacagca

SEQ ID NO: 70998 - DNA, 22 bp, Artificial Sequence
  chemically synthesized
cattttaatcctcacagcagct

SEQ ID NO: 70999 - DNA, 22 bp, Artificial Sequence
  chemically synthesized
taatcctcacagcagctcaaca

SEQ ID NO: 71000 - DNA, 22 bp, Artificial Sequence
  chemically synthesized
aatcctcacagcagctcaacaa

SEQ ID NO: 71001 - DNA, 22 bp, Artificial Sequence
  chemically synthesized
atcctcacagcagctcaacaag

SEQ ID NO: 71002 - DNA, 22 bp, Artificial Sequence
  chemically synthesized
acagcagctcaacaaggtacat

SEQ ID NO: 71003 - DNA, 22 bp, Artificial Sequence
  chemically synthesized
aacaaggtacataccgtcacca

SEQ ID NO: 71004 - DNA, 22 bp, Artificial Sequence
  chemically synthesized
tacagatagggaaattgaggct

SEQ ID NO: 71005 - DNA, 22 bp, Artificial Sequence
  chemically synthesized
acagatagggaaattgaggctc

SEQ ID NO: 71006 - DNA, 22 bp, Artificial Sequence
  chemically synthesized
cagatagggaaattgaggctcg

SEQ ID NO: 71007 - DNA, 22 bp, Artificial Sequence
  chemically synthesized
aggctcggagcggttaaacaac

SEQ ID NO: 71008 - DNA, 22 bp, Artificial Sequence
  chemically synthesized
ggagcggttaaacaactcacct

SEQ ID NO: 71009 - DNA, 22 bp, Artificial Sequence
  chemically synthesized
aacaactcacctgaggcctcac

SEQ ID NO: 71010 - DNA, 22 bp, Artificial Sequence
  chemically synthesized
acctgaggcctcacagccagta

SEQ ID NO: 71011 - DNA, 22 bp, Artificial Sequence
  chemically synthesized
aggcctcacagccagtaagtgg

SEQ ID NO: 71012 - DNA, 22 bp, Artificial Sequence
  chemically synthesized
acagccagtaagtgggttccct

SEQ ID NO: 71013 - DNA, 22 bp, Artificial Sequence
  chemically synthesized
cctggtctgaatgtgtgtgctg

SEQ ID NO: 71014 - DNA, 22 bp, Artificial Sequence
  chemically synthesized
gtctgaatgtgtgtgctggagg

SEQ ID NO: 71015 - DNA, 22 bp, Artificial Sequence
  chemically synthesized
aatgtgtgtgctggaggatcct

SEQ ID NO: 71016 - DNA, 22 bp, Artificial Sequence
  chemically synthesized
gaggatcctgtgggtcactcgc

SEQ ID NO: 71017 - DNA, 22 bp, Artificial Sequence
  chemically synthesized
tgggtcactcgcctggtagagc

SEQ ID NO: 71018 - DNA, 22 bp, Artificial Sequence
  chemically synthesized
gcctggtagagccccaaggtgg

SEQ ID NO: 71019 - DNA, 22 bp, Artificial Sequence
  chemically synthesized
gtagagccccaaggtggaggca

SEQ ID NO: 71020 - DNA, 22 bp, Artificial Sequence
  chemically synthesized
gtgaatgacagaaggggcaaaa

SEQ ID NO: 71021 - DNA, 22 bp, Artificial Sequence
  chemically synthesized
atccattcactctgcaagtatc

SEQ ID NO: 71022 - DNA, 22 bp, Artificial Sequence
  chemically synthesized
actctgcaagtatctacggcac

SEQ ID NO: 71023 - DNA, 22 bp, Artificial Sequence
  chemically synthesized
tgcaagtatctacggcacgtac

SEQ ID NO: 71024 - DNA, 22 bp, Artificial Sequence
  chemically synthesized
caagtatctacggcacgtacgc

SEQ ID NO: 71025 - DNA, 22 bp, Artificial Sequence
  chemically synthesized
cggcacgtacgccagctcccaa

SEQ ID NO: 71026 - DNA, 22 bp, Artificial Sequence
  chemically synthesized
ccaagcaggtttgcgggttgca

SEQ ID NO: 71027 - DNA, 22 bp, Artificial Sequence
  chemically synthesized
gcgggttgcacagcgggcgatg

SEQ ID NO: 71028 - DNA, 22 bp, Artificial Sequence
  chemically synthesized
cgggttgcacagcgggcgatgc

SEQ ID NO: 71029 - DNA, 22 bp, Artificial Sequence
  chemically synthesized
cacagcgggcgatgcaatctga

SEQ ID NO: 71030 - DNA, 22 bp, Artificial Sequence
  chemically synthesized
atttaggcttttaaagggattg

SEQ ID NO: 71031 - DNA, 22 bp, Artificial Sequence
  chemically synthesized
aggcttttaaagggattgcaat

SEQ ID NO: 71032 - DNA, 22 bp, Artificial Sequence
  chemically synthesized
ggcttttaaagggattgcaatc

SEQ ID NO: 71033 - DNA, 22 bp, Artificial Sequence
  chemically synthesized
ttaaagggattgcaatcaagtg

SEQ ID NO: 71034 - DNA, 22 bp, Artificial Sequence
  chemically synthesized
taaagggattgcaatcaagtgg

SEQ ID NO: 71035 - DNA, 22 bp, Artificial Sequence
  chemically synthesized
aaagggattgcaatcaagtggg

SEQ ID NO: 71036 - DNA, 22 bp, Artificial Sequence
  chemically synthesized
aagggattgcaatcaagtgggg

SEQ ID NO: 71037 - DNA, 22 bp, Artificial Sequence
  chemically synthesized
caatcaagtggggccccactag

SEQ ID NO: 71038 - DNA, 22 bp, Artificial Sequence
  chemically synthesized
gcctcaaccctgtacctcccct

SEQ ID NO: 71039 - DNA, 22 bp, Artificial Sequence
  chemically synthesized
aaccctgtacctcccctcccct

SEQ ID NO: 71040 - DNA, 22 bp, Artificial Sequence
  chemically synthesized
tacctcccctcccctccacccc

SEQ ID NO: 71041 - DNA, 22 bp, Artificial Sequence
  chemically synthesized
ccctcccctccacccccagcag

SEQ ID NO: 71042 - DNA, 22 bp, Artificial Sequence
  chemically synthesized
ccctccacccccagcagtctcc

SEQ ID NO: 71043 - DNA, 22 bp, Artificial Sequence
  chemically synthesized
cacccccagcagtctccaaagg

SEQ ID NO: 71044 - DNA, 22 bp, Artificial Sequence
  chemically synthesized
caaaggcctccaacaaccccag

SEQ ID NO: 71045 - DNA, 22 bp, Artificial Sequence
  chemically synthesized
caacaaccccagagtgggggcc

SEQ ID NO: 71046 - DNA, 22 bp, Artificial Sequence
  chemically synthesized
caagctgtatacggatcacact

SEQ ID NO: 71047 - DNA, 22 bp, Artificial Sequence
  chemically synthesized
tatacggatcacactggttttc

SEQ ID NO: 71048 - DNA, 22 bp, Artificial Sequence
  chemically synthesized
gttttccaggagcaaaaacaga

SEQ ID NO: 71049 - DNA, 22 bp, Artificial Sequence
  chemically synthesized
tccaggagcaaaaacagaaaca

SEQ ID NO: 71050 - DNA, 22 bp, Artificial Sequence
  chemically synthesized
ccaggagcaaaaacagaaacag

SEQ ID NO: 71051 - DNA, 22 bp, Artificial Sequence
  chemically synthesized
caggagcaaaaacagaaacagg

SEQ ID NO: 71052 - DNA, 22 bp, Artificial Sequence
  chemically synthesized
aggctggtcaaaattgaacctc

SEQ ID NO: 71053 - DNA, 22 bp, Artificial Sequence
  chemically synthesized
gtcaaaattgaacctcctcctg

SEQ ID NO: 71054 - DNA, 22 bp, Artificial Sequence
  chemically synthesized
aacctcctcctgctctgagcag

SEQ ID NO: 71055 - DNA, 22 bp, Artificial Sequence
  chemically synthesized
ctcctgctctgagcagcctggg

SEQ ID NO: 71056 - DNA, 22 bp, Artificial Sequence
  chemically synthesized
ctgctctgagcagcctgggggg

SEQ ID NO: 71057 - DNA, 22 bp, Artificial Sequence
  chemically synthesized
ctctgagcagcctggggggcag

SEQ ID NO: 71058 - DNA, 22 bp, Artificial Sequence
  chemically synthesized
tgagcagcctggggggcagact

SEQ ID NO: 71059 - DNA, 22 bp, Artificial Sequence
  chemically synthesized
agcagcctggggggcagactaa

SEQ ID NO: 71060 - DNA, 22 bp, Artificial Sequence
  chemically synthesized
gggggcagactaagcagagggc

SEQ ID NO: 71061 - DNA, 22 bp, Artificial Sequence
  chemically synthesized
agcagagggctgtgcagaccca

SEQ ID NO: 71062 - DNA, 22 bp, Artificial Sequence
  chemically synthesized
tgcagacccacataaagagcct

SEQ ID NO: 71063 - DNA, 22 bp, Artificial Sequence
  chemically synthesized
ctgtgtgccaggcacttcaccc

SEQ ID NO: 71064 - DNA, 22 bp, Artificial Sequence
  chemically synthesized
tgtgccaggcacttcacccgag

SEQ ID NO: 71065 - DNA, 22 bp, Artificial Sequence
  chemically synthesized
cacccgaggcacttcacaagca

SEQ ID NO: 71066 - DNA, 22 bp, Artificial Sequence
  chemically synthesized
acccgaggcacttcacaagcat

SEQ ID NO: 71067 - DNA, 22 bp, Artificial Sequence
  chemically synthesized
cacaagcatgcttgggaatgaa

SEQ ID NO: 71068 - DNA, 22 bp, Artificial Sequence
  chemically synthesized
acaagcatgcttgggaatgaaa

SEQ ID NO: 71069 - DNA, 22 bp, Artificial Sequence
  chemically synthesized
gggaatgaaacttccaactctt

SEQ ID NO: 71070 - DNA, 22 bp, Artificial Sequence
  chemically synthesized
ggaatgaaacttccaactcttt

SEQ ID NO: 71071 - DNA, 22 bp, Artificial Sequence
  chemically synthesized
ccaactctttgggatgcaggtg

SEQ ID NO: 71072 - DNA, 22 bp, Artificial Sequence
  chemically synthesized
caactctttgggatgcaggtga

SEQ ID NO: 71073 - DNA, 22 bp, Artificial Sequence
  chemically synthesized
tttgggatgcaggtgaaacagt

SEQ ID NO: 71074 - DNA, 22 bp, Artificial Sequence
  chemically synthesized
tgggatgcaggtgaaacagttc

SEQ ID NO: 71075 - DNA, 22 bp, Artificial Sequence
  chemically synthesized
gggatgcaggtgaaacagttcc

SEQ ID NO: 71076 - DNA, 22 bp, Artificial Sequence
  chemically synthesized
ggatgcaggtgaaacagttcct

SEQ ID NO: 71077 - DNA, 22 bp, Artificial Sequence
  chemically synthesized
ctggttcagagaggtgaagcgg

SEQ ID NO: 71078 - DNA, 22 bp, Artificial Sequence
  chemically synthesized
gttcagagaggtgaagcggcct

SEQ ID NO: 71079 - DNA, 22 bp, Artificial Sequence
  chemically synthesized
agagaggtgaagcggcctgcct

SEQ ID NO: 71080 - DNA, 22 bp, Artificial Sequence
  chemically synthesized
cctgaggcagcacagctcttct

SEQ ID NO: 71081 - DNA, 22 bp, Artificial Sequence
  chemically synthesized
aggcagcacagctcttctttac

SEQ ID NO: 71082 - DNA, 22 bp, Artificial Sequence
  chemically synthesized
ttctttacagatgtgcttcccc

SEQ ID NO: 71083 - DNA, 22 bp, Artificial Sequence
  chemically synthesized
ctttacagatgtgcttccccac

SEQ ID NO: 71084 - DNA, 22 bp, Artificial Sequence
  chemically synthesized
tttacagatgtgcttccccacc

SEQ ID NO: 71085 - DNA, 22 bp, Artificial Sequence
  chemically synthesized
tacagatgtgcttccccacctc

SEQ ID NO: 71086 - DNA, 22 bp, Artificial Sequence
  chemically synthesized
acagatgtgcttccccacctct

SEQ ID NO: 71087 - DNA, 22 bp, Artificial Sequence
  chemically synthesized
cagatgtgcttccccacctcta

SEQ ID NO: 71088 - DNA, 22 bp, Artificial Sequence
  chemically synthesized
ccccacctctaccctgtctcac

SEQ ID NO: 71089 - DNA, 22 bp, Artificial Sequence
  chemically synthesized
cccacctctaccctgtctcacg

SEQ ID NO: 71090 - DNA, 22 bp, Artificial Sequence
  chemically synthesized
taccctgtctcacggcccccca

SEQ ID NO: 71091 - DNA, 22 bp, Artificial Sequence
  chemically synthesized
ccctgtctcacggccccccatg

SEQ ID NO: 71092 - DNA, 22 bp, Artificial Sequence
  chemically synthesized
tctcacggccccccatgccagc

SEQ ID NO: 71093 - DNA, 22 bp, Artificial Sequence
  chemically synthesized
acggccccccatgccagcctga

SEQ ID NO: 71094 - DNA, 22 bp, Artificial Sequence
  chemically synthesized
acggttgtgtctgcctcagtca

SEQ ID NO: 71095 - DNA, 22 bp, Artificial Sequence
  chemically synthesized
tgtctgcctcagtcatgctcca

SEQ ID NO: 71096 - DNA, 22 bp, Artificial Sequence
  chemically synthesized
cctcagtcatgctccatttttc

SEQ ID NO: 71097 - DNA, 22 bp, Artificial Sequence
  chemically synthesized
agtcatgctccatttttccatc

SEQ ID NO: 71098 - DNA, 22 bp, Artificial Sequence
  chemically synthesized
catttttccatcgggaccatca

SEQ ID NO: 71099 - DNA, 22 bp, Artificial Sequence
  chemically synthesized
ttccatcgggaccatcaagagg

SEQ ID NO: 71100 - DNA, 22 bp, Artificial Sequence
  chemically synthesized
tccatcgggaccatcaagaggg

SEQ ID NO: 71101 - DNA, 22 bp, Artificial Sequence
  chemically synthesized
ccatcgggaccatcaagagggt

SEQ ID NO: 71102 - DNA, 22 bp, Artificial Sequence
  chemically synthesized
catcgggaccatcaagagggtg

SEQ ID NO: 71103 - DNA, 22 bp, Artificial Sequence
  chemically synthesized
gtgtctaaggctgactgggtaa

SEQ ID NO: 71104 - DNA, 22 bp, Artificial Sequence
  chemically synthesized
tgtctaaggctgactgggtaac

SEQ ID NO: 71105 - DNA, 22 bp, Artificial Sequence
  chemically synthesized
aggctgactgggtaactttgga

SEQ ID NO: 71106 - DNA, 22 bp, Artificial Sequence
  chemically synthesized
actgggtaactttggatgagcg

SEQ ID NO: 71107 - DNA, 22 bp, Artificial Sequence
  chemically synthesized
ggtaactttggatgagcggtct

SEQ ID NO: 71108 - DNA, 22 bp, Artificial Sequence
  chemically synthesized
tggatgagcggtctctccgctc

SEQ ID NO: 71109 - DNA, 22 bp, Artificial Sequence
  chemically synthesized
ggatgagcggtctctccgctct

SEQ ID NO: 71110 - DNA, 22 bp, Artificial Sequence
  chemically synthesized
gatgagcggtctctccgctctg

SEQ ID NO: 71111 - DNA, 22 bp, Artificial Sequence
  chemically synthesized
tccgctctgagcctgtttcctc

SEQ ID NO: 71112 - DNA, 22 bp, Artificial Sequence
  chemically synthesized
cgctctgagcctgtttcctcat

SEQ ID NO: 71113 - DNA, 22 bp, Artificial Sequence
  chemically synthesized
tgagcctgtttcctcatctgtc

SEQ ID NO: 71114 - DNA, 22 bp, Artificial Sequence
  chemically synthesized
agcctgtttcctcatctgtcaa

SEQ ID NO: 71115 - DNA, 22 bp, Artificial Sequence
  chemically synthesized
tttcctcatctgtcaaatgggc

SEQ ID NO: 71116 - DNA, 22 bp, Artificial Sequence
  chemically synthesized
cctcatctgtcaaatgggctct

SEQ ID NO: 71117 - DNA, 22 bp, Artificial Sequence
  chemically synthesized
ctcatctgtcaaatgggctcta

SEQ ID NO: 71118 - DNA, 22 bp, Artificial Sequence
  chemically synthesized
atctgtcaaatgggctctaacc

SEQ ID NO: 71119 - DNA, 22 bp, Artificial Sequence
  chemically synthesized
tcaaatgggctctaacccactc

SEQ ID NO: 71120 - DNA, 22 bp, Artificial Sequence
  chemically synthesized
taacccactctgatctcccagg

SEQ ID NO: 71121 - DNA, 22 bp, Artificial Sequence
  chemically synthesized
acccactctgatctcccagggc

SEQ ID NO: 71122 - DNA, 22 bp, Artificial Sequence
  chemically synthesized
tgatctcccagggcggcagtaa

SEQ ID NO: 71123 - DNA, 22 bp, Artificial Sequence
  chemically synthesized
atctcccagggcggcagtaagt

SEQ ID NO: 71124 - DNA, 22 bp, Artificial Sequence
  chemically synthesized
ccagggcggcagtaagtcttca

SEQ ID NO: 71125 - DNA, 22 bp, Artificial Sequence
  chemically synthesized
cagcatcaggcattttggggtg

SEQ ID NO: 71126 - DNA, 22 bp, Artificial Sequence
  chemically synthesized
agcatcaggcattttggggtga

SEQ ID NO: 71127 - DNA, 22 bp, Artificial Sequence
  chemically synthesized
tggggtgactcagtaaatggta

SEQ ID NO: 71128 - DNA, 22 bp, Artificial Sequence
  chemically synthesized
ggggtgactcagtaaatggtag

SEQ ID NO: 71129 - DNA, 22 bp, Artificial Sequence
  chemically synthesized
gggtgactcagtaaatggtaga

SEQ ID NO: 71130 - DNA, 22 bp, Artificial Sequence
  chemically synthesized
agtaaatggtagatcttgctac

SEQ ID NO: 71131 - DNA, 22 bp, Artificial Sequence
  chemically synthesized
gctaccagtggaacagccacta

SEQ ID NO: 71132 - DNA, 22 bp, Artificial Sequence
  chemically synthesized
ctaccagtggaacagccactaa

SEQ ID NO: 71133 - DNA, 22 bp, Artificial Sequence
  chemically synthesized
ccagtggaacagccactaagga

SEQ ID NO: 71134 - DNA, 22 bp, Artificial Sequence
  chemically synthesized
aggattctgcagtgagagcaga

SEQ ID NO: 71135 - DNA, 22 bp, Artificial Sequence
  chemically synthesized
tgcagtgagagcagagggccag

SEQ ID NO: 71136 - DNA, 22 bp, Artificial Sequence
  chemically synthesized
cagtgagagcagagggccagct

SEQ ID NO: 71137 - DNA, 22 bp, Artificial Sequence
  chemically synthesized
agtggtactctcccagagactg

SEQ ID NO: 71138 - DNA, 22 bp, Artificial Sequence
  chemically synthesized
tcccagagactgtctgactcac

SEQ ID NO: 71139 - DNA, 22 bp, Artificial Sequence
  chemically synthesized
ccagagactgtctgactcacgc

SEQ ID NO: 71140 - DNA, 22 bp, Artificial Sequence
  chemically synthesized
tctgactcacgccaccccctcc

SEQ ID NO: 71141 - DNA, 22 bp, Artificial Sequence
  chemically synthesized
actcacgccaccccctccacct

SEQ ID NO: 71142 - DNA, 22 bp, Artificial Sequence
  chemically synthesized
acgccaccccctccaccttgga

SEQ ID NO: 71143 - DNA, 22 bp, Artificial Sequence
  chemically synthesized
caccttggacacaggacgctgt

SEQ ID NO: 71144 - DNA, 22 bp, Artificial Sequence
  chemically synthesized
ggacacaggacgctgtggtttc

SEQ ID NO: 71145 - DNA, 22 bp, Artificial Sequence
  chemically synthesized
gacacaggacgctgtggtttct

SEQ ID NO: 71146 - DNA, 22 bp, Artificial Sequence
  chemically synthesized
tggtttctgagccaggtacaat

SEQ ID NO: 71147 - DNA, 22 bp, Artificial Sequence
  chemically synthesized
ctgagccaggtacaatgactcc

SEQ ID NO: 71148 - DNA, 22 bp, Artificial Sequence
  chemically synthesized
tgagccaggtacaatgactcct

SEQ ID NO: 71149 - DNA, 22 bp, Artificial Sequence
  chemically synthesized
agccaggtacaatgactccttt

SEQ ID NO: 71150 - DNA, 22 bp, Artificial Sequence
  chemically synthesized
ctttcggtaagtgcagtggaag

SEQ ID NO: 71151 - DNA, 22 bp, Artificial Sequence
  chemically synthesized
tcggtaagtgcagtggaagctg

SEQ ID NO: 71152 - DNA, 22 bp, Artificial Sequence
  chemically synthesized
cggtaagtgcagtggaagctgt

SEQ ID NO: 71153 - DNA, 22 bp, Artificial Sequence
  chemically synthesized
ggtaagtgcagtggaagctgta

SEQ ID NO: 71154 - DNA, 22 bp, Artificial Sequence
  chemically synthesized
tacactgcccaggcaaagcgtc

SEQ ID NO: 71155 - DNA, 22 bp, Artificial Sequence
  chemically synthesized
cccaggcaaagcgtccgggcag

SEQ ID NO: 71156 - DNA, 22 bp, Artificial Sequence
  chemically synthesized
agatcccagccagtggacttag

SEQ ID NO: 71157 - DNA, 22 bp, Artificial Sequence
  chemically synthesized
agcccctgtttgctcctccgat

SEQ ID NO: 71158 - DNA, 22 bp, Artificial Sequence
  chemically synthesized
gcccctgtttgctcctccgata

SEQ ID NO: 71159 - DNA, 22 bp, Artificial Sequence
  chemically synthesized
tttgctcctccgataactgggg

SEQ ID NO: 71160 - DNA, 22 bp, Artificial Sequence
  chemically synthesized
gctcctccgataactggggtga

SEQ ID NO: 71161 - DNA, 22 bp, Artificial Sequence
  chemically synthesized
ctcctccgataactggggtgac

SEQ ID NO: 71162 - DNA, 22 bp, Artificial Sequence
  chemically synthesized
ctccgataactggggtgacctt

SEQ ID NO: 71163 - DNA, 22 bp, Artificial Sequence
  chemically synthesized
cgataactggggtgaccttggt

SEQ ID NO: 71164 - DNA, 22 bp, Artificial Sequence
  chemically synthesized
gggtgaccttggttaatattca

SEQ ID NO: 71165 - DNA, 22 bp, Artificial Sequence
  chemically synthesized
ggttaatattcaccagcagcct

SEQ ID NO: 71166 - DNA, 22 bp, Artificial Sequence
  chemically synthesized
gttaatattcaccagcagcctc

SEQ ID NO: 71167 - DNA, 22 bp, Artificial Sequence
  chemically synthesized
atattcaccagcagcctccccc

SEQ ID NO: 71168 - DNA, 22 bp, Artificial Sequence
  chemically synthesized
accagcagcctcccccgttgcc

SEQ ID NO: 71169 - DNA, 22 bp, Artificial Sequence
  chemically synthesized
ccccgttgcccctctggatcca

SEQ ID NO: 71170 - DNA, 22 bp, Artificial Sequence
  chemically synthesized
cccctctggatccactgcttaa

SEQ ID NO: 71171 - DNA, 22 bp, Artificial Sequence
  chemically synthesized
tggatccactgcttaaatacgg

SEQ ID NO: 71172 - DNA, 22 bp, Artificial Sequence
  chemically synthesized
gatccactgcttaaatacggac

SEQ ID NO: 71173 - DNA, 22 bp, Artificial Sequence
  chemically synthesized
cttaaatacggacgaggacagg

SEQ ID NO: 71174 - DNA, 22 bp, Artificial Sequence
  chemically synthesized
aaatacggacgaggacagggcc

SEQ ID NO: 71175 - DNA, 22 bp, Artificial Sequence
  chemically synthesized
aatacggacgaggacagggccc

SEQ ID NO: 71176 - DNA, 22 bp, Artificial Sequence
  chemically synthesized
tctcctcagcttcaggcaccac

SEQ ID NO: 71177 - DNA, 22 bp, Artificial Sequence
  chemically synthesized
ctcagcttcaggcaccaccact

SEQ ID NO: 71178 - DNA, 22 bp, Artificial Sequence
  chemically synthesized
agcttcaggcaccaccactgac

SEQ ID NO: 71179 - DNA, 22 bp, Artificial Sequence
  chemically synthesized
caggcaccaccactgacctggg

SEQ ID NO: 71180 - DNA, 22 bp, Artificial Sequence
  chemically synthesized
aggcaccaccactgacctggga

SEQ ID NO: 71181 - DNA, 22 bp, Artificial Sequence
  chemically synthesized
acctgggacagtgaatcgtaag

SEQ ID NO: 71182 - DNA, 22 bp, Artificial Sequence
  chemically synthesized
ggacagtgaatcgtaagtatgc

SEQ ID NO: 71183 - DNA, 22 bp, Artificial Sequence
  chemically synthesized
tcactgcgagaggttctggaga

SEQ ID NO: 71184 - DNA, 22 bp, Artificial Sequence
  chemically synthesized
cactgcgagaggttctggagag

SEQ ID NO: 71185 - DNA, 22 bp, Artificial Sequence
  chemically synthesized
actgcgagaggttctggagagg

SEQ ID NO: 71186 - DNA, 22 bp, Artificial Sequence
  chemically synthesized
cgagaggttctggagaggcttc

SEQ ID NO: 71187 - DNA, 22 bp, Artificial Sequence
  chemically synthesized
tggagaggcttctgagctcccc

SEQ ID NO: 71188 - DNA, 22 bp, Artificial Sequence
  chemically synthesized
gagaggcttctgagctccccat

SEQ ID NO: 71189 - DNA, 22 bp, Artificial Sequence
  chemically synthesized
ctgagctccccatggcccaggc

SEQ ID NO: 71190 - DNA, 22 bp, Artificial Sequence
  chemically synthesized
tgagctccccatggcccaggca

SEQ ID NO: 71191 - DNA, 22 bp, Artificial Sequence
  chemically synthesized
agctccccatggcccaggcagg

SEQ ID NO: 71192 - DNA, 22 bp, Artificial Sequence
  chemically synthesized
cccatggcccaggcaggcagca

SEQ ID NO: 71193 - DNA, 22 bp, Artificial Sequence
  chemically synthesized
gggcaggaggggggttgtggag

SEQ ID NO: 71194 - DNA, 22 bp, Artificial Sequence
  chemically synthesized
tggagtgggtatccgcctgctg

SEQ ID NO: 71195 - DNA, 22 bp, Artificial Sequence
  chemically synthesized
ctgaggtgcagggcagatggag

SEQ ID NO: 71196 - DNA, 22 bp, Artificial Sequence
  chemically synthesized
aggtgcagggcagatggagagg

SEQ ID NO: 71197 - DNA, 22 bp, Artificial Sequence
  chemically synthesized
cagctgagctcctattttcata

SEQ ID NO: 71198 - DNA, 22 bp, Artificial Sequence
  chemically synthesized
agctcctattttcataataaca

SEQ ID NO: 71199 - DNA, 22 bp, Artificial Sequence
  chemically synthesized
ctattttcataataacagcagc

SEQ ID NO: 71200 - DNA, 22 bp, Artificial Sequence
  chemically synthesized
ttttcataataacagcagccat

SEQ ID NO: 71201 - DNA, 22 bp, Artificial Sequence
  chemically synthesized
tcataataacagcagccatgag

SEQ ID NO: 71202 - DNA, 22 bp, Artificial Sequence
  chemically synthesized
cataataacagcagccatgagg

SEQ ID NO: 71203 - DNA, 22 bp, Artificial Sequence
  chemically synthesized
ataataacagcagccatgaggg

SEQ ID NO: 71204 - DNA, 22 bp, Artificial Sequence
  chemically synthesized
tgtcctgtttcccagtcctgcc

SEQ ID NO: 71205 - DNA, 22 bp, Artificial Sequence
  chemically synthesized
tttcccagtcctgcccggtccc

SEQ ID NO: 71206 - DNA, 22 bp, Artificial Sequence
  chemically synthesized
cccagtcctgcccggtcccccc

SEQ ID NO: 71207 - DNA, 22 bp, Artificial Sequence
  chemically synthesized
ccagtcctgcccggtcccccct

SEQ ID NO: 71208 - DNA, 22 bp, Artificial Sequence
  chemically synthesized
cccggtcccccctcggtacctc

SEQ ID NO: 71209 - DNA, 22 bp, Artificial Sequence
  chemically synthesized
ggtacctcctggtggatacact

SEQ ID NO: 71210 - DNA, 22 bp, Artificial Sequence
  chemically synthesized
ctggtggatacactggttcctg

SEQ ID NO: 71211 - DNA, 22 bp, Artificial Sequence
  chemically synthesized
gtggatacactggttcctgtaa

SEQ ID NO: 71212 - DNA, 22 bp, Artificial Sequence
  chemically synthesized
gttcctgtaagcagaagtggat

SEQ ID NO: 71213 - DNA, 22 bp, Artificial Sequence
  chemically synthesized
ctgtaagcagaagtggatgagg

SEQ ID NO: 71214 - DNA, 22 bp, Artificial Sequence
  chemically synthesized
taagcagaagtggatgagggtg

SEQ ID NO: 71215 - DNA, 22 bp, Artificial Sequence
  chemically synthesized
ggtctgcagtcctggcacccca

SEQ ID NO: 71216 - DNA, 22 bp, Artificial Sequence
  chemically synthesized
cagtcctggcaccccaggatgg

SEQ ID NO: 71217 - DNA, 22 bp, Artificial Sequence
  chemically synthesized
gcaccccaggatgggggacacc

SEQ ID NO: 71218 - DNA, 22 bp, Artificial Sequence
  chemically synthesized
ctttctgtttgcacagctcctc

SEQ ID NO: 71219 - DNA, 22 bp, Artificial Sequence
  chemically synthesized
tttctgtttgcacagctcctct

SEQ ID NO: 71220 - DNA, 22 bp, Artificial Sequence
  chemically synthesized
tctgtttgcacagctcctctgt

SEQ ID NO: 71221 - DNA, 22 bp, Artificial Sequence
  chemically synthesized
ctgtttgcacagctcctctgtc

SEQ ID NO: 71222 - DNA, 22 bp, Artificial Sequence
  chemically synthesized
tgtttgcacagctcctctgtct

SEQ ID NO: 71223 - DNA, 22 bp, Artificial Sequence
  chemically synthesized
tttgcacagctcctctgtctgt

SEQ ID NO: 71224 - DNA, 22 bp, Artificial Sequence
  chemically synthesized
gcacagctcctctgtctgtcgg

SEQ ID NO: 71225 - DNA, 22 bp, Artificial Sequence
  chemically synthesized
cacagctcctctgtctgtcggg

SEQ ID NO: 71226 - DNA, 22 bp, Artificial Sequence
  chemically synthesized
ctctgtctgtcgggggctcctg

SEQ ID NO: 71227 - DNA, 22 bp, Artificial Sequence
  chemically synthesized
tgtctgtcgggggctcctgtct

SEQ ID NO: 71228 - DNA, 22 bp, Artificial Sequence
  chemically synthesized
tctgtcgggggctcctgtctgt

SEQ ID NO: 71229 - DNA, 22 bp, Artificial Sequence
  chemically synthesized
tcgggggctcctgtctgttgtc

SEQ ID NO: 71230 - DNA, 22 bp, Artificial Sequence
  chemically synthesized
ctgtctgttgtctcctataagc

SEQ ID NO: 71231 - DNA, 22 bp, Artificial Sequence
  chemically synthesized
tctgttgtctcctataagcctc

SEQ ID NO: 71232 - DNA, 22 bp, Artificial Sequence
  chemically synthesized
ttgtctcctataagcctcacca

SEQ ID NO: 71233 - DNA, 22 bp, Artificial Sequence
  chemically synthesized
tctcctataagcctcaccacct

SEQ ID NO: 71234 - DNA, 22 bp, Artificial Sequence
  chemically synthesized
ctataagcctcaccacctctcc

SEQ ID NO: 71235 - DNA, 22 bp, Artificial Sequence
  chemically synthesized
taagcctcaccacctctcctac

SEQ ID NO: 71236 - DNA, 22 bp, Artificial Sequence
  chemically synthesized
accacctctcctactgcttggg

SEQ ID NO: 71237 - DNA, 22 bp, Artificial Sequence
  chemically synthesized
tcctactgcttgggcatgcatc

SEQ ID NO: 71238 - DNA, 22 bp, Artificial Sequence
  chemically synthesized
ctactgcttgggcatgcatctt

SEQ ID NO: 71239 - DNA, 22 bp, Artificial Sequence
  chemically synthesized
ctgcttgggcatgcatctttct

SEQ ID NO: 71240 - DNA, 22 bp, Artificial Sequence
  chemically synthesized
cttgggcatgcatctttctccc

SEQ ID NO: 71241 - DNA, 22 bp, Artificial Sequence
  chemically synthesized
gggcatgcatctttctcccctt

SEQ ID NO: 71242 - DNA, 22 bp, Artificial Sequence
  chemically synthesized
ggcatgcatctttctccccttc

SEQ ID NO: 71243 - DNA, 22 bp, Artificial Sequence
  chemically synthesized
tctccccttctatagatgagga

SEQ ID NO: 71244 - DNA, 22 bp, Artificial Sequence
  chemically synthesized
ctccccttctatagatgaggag

SEQ ID NO: 71245 - DNA, 22 bp, Artificial Sequence
  chemically synthesized
tccccttctatagatgaggagg

SEQ ID NO: 71246 - DNA, 22 bp, Artificial Sequence
  chemically synthesized
cccttctatagatgaggaggtt

SEQ ID NO: 71247 - DNA, 22 bp, Artificial Sequence
  chemically synthesized
ctatagatgaggaggttaaggt

SEQ ID NO: 71248 - DNA, 22 bp, Artificial Sequence
  chemically synthesized
tatagatgaggaggttaaggtc

SEQ ID NO: 71249 - DNA, 22 bp, Artificial Sequence
  chemically synthesized
tagatgaggaggttaaggtcca

SEQ ID NO: 71250 - DNA, 22 bp, Artificial Sequence
  chemically synthesized
aggtccagagaggggtggggag

SEQ ID NO: 71251 - DNA, 22 bp, Artificial Sequence
  chemically synthesized
acattctccatcccctccagat

SEQ ID NO: 71252 - DNA, 22 bp, Artificial Sequence
  chemically synthesized
tccatcccctccagatatgacc

SEQ ID NO: 71253 - DNA, 22 bp, Artificial Sequence
  chemically synthesized
catcccctccagatatgaccag

SEQ ID NO: 71254 - DNA, 22 bp, Artificial Sequence
  chemically synthesized
cagatatgaccaggaacagacc

SEQ ID NO: 71255 - DNA, 20 bp, Artificial Sequence
  chemically synthesized
cgagcgagccgcgatgacaa

SEQ ID NO: 71256 - DNA, 20 bp, Artificial Sequence
  chemically synthesized
tcccatcaacatttctgtgc

SEQ ID NO: 71257 - DNA, 20 bp, Artificial Sequence
  chemically synthesized
tgctggactccttccactcg

SEQ ID NO: 71258 - DNA, 20 bp, Artificial Sequence
  chemically synthesized
gctggactccttccactcgc

SEQ ID NO: 71259 - DNA, 20 bp, Artificial Sequence
  chemically synthesized
ttccactcgcgggtcgtctc

SEQ ID NO: 71260 - DNA, 20 bp, Artificial Sequence
  chemically synthesized
ccactcgcgggtcgtctcca

SEQ ID NO: 71261 - DNA, 20 bp, Artificial Sequence
  chemically synthesized
cgcgggtcgtctccagagct

SEQ ID NO: 71262 - DNA, 20 bp, Artificial Sequence
  chemically synthesized
gtctccagagctcagaaaat

SEQ ID NO: 71263 - DNA, 20 bp, Artificial Sequence
  chemically synthesized
tctccagagctcagaaaatg

SEQ ID NO: 71264 - DNA, 20 bp, Artificial Sequence
  chemically synthesized
agctcagaaaatgaggtgat

SEQ ID NO: 71265 - DNA, 20 bp, Artificial Sequence
  chemically synthesized
tcagaaaatgaggtgatcag

SEQ ID NO: 71266 - DNA, 20 bp, Artificial Sequence
  chemically synthesized
cagaaaatgaggtgatcagt

SEQ ID NO: 71267 - DNA, 20 bp, Artificial Sequence
  chemically synthesized
aatgaggtgatcagtgggac

SEQ ID NO: 71268 - DNA, 20 bp, Artificial Sequence
  chemically synthesized
aggtgatcagtgggacgagt

SEQ ID NO: 71269 - DNA, 20 bp, Artificial Sequence
  chemically synthesized
ggtgatcagtgggacgagta

SEQ ID NO: 71270 - DNA, 20 bp, Artificial Sequence
  chemically synthesized
gatcagtgggacgagtaagg

SEQ ID NO: 71271 - DNA, 20 bp, Artificial Sequence
  chemically synthesized
atcagtgggacgagtaagga

SEQ ID NO: 71272 - DNA, 20 bp, Artificial Sequence
  chemically synthesized
tcagtgggacgagtaaggaa

SEQ ID NO: 71273 - DNA, 20 bp, Artificial Sequence
  chemically synthesized
cagtgggacgagtaaggaag

SEQ ID NO: 71274 - DNA, 20 bp, Artificial Sequence
  chemically synthesized
agtgggacgagtaaggaagg

SEQ ID NO: 71275 - DNA, 20 bp, Artificial Sequence
  chemically synthesized
gtgggacgagtaaggaaggg

SEQ ID NO: 71276 - DNA, 20 bp, Artificial Sequence
  chemically synthesized
gacgagtaaggaaggggggt

SEQ ID NO: 71277 - DNA, 20 bp, Artificial Sequence
  chemically synthesized
acgagtaaggaaggggggtt

SEQ ID NO: 71278 - DNA, 20 bp, Artificial Sequence
  chemically synthesized
gagtaaggaaggggggttgg

SEQ ID NO: 71279 - DNA, 20 bp, Artificial Sequence
  chemically synthesized
gtaaggaaggggggttggga

SEQ ID NO: 71280 - DNA, 20 bp, Artificial Sequence
  chemically synthesized
taaggaaggggggttgggag

SEQ ID NO: 71281 - DNA, 20 bp, Artificial Sequence
  chemically synthesized
aaggaaggggggttgggaga

SEQ ID NO: 71282 - DNA, 20 bp, Artificial Sequence
  chemically synthesized
aggaaggggggttgggagag

SEQ ID NO: 71283 - DNA, 20 bp, Artificial Sequence
  chemically synthesized
ggggttgggagaggggcgat

SEQ ID NO: 71284 - DNA, 20 bp, Artificial Sequence
  chemically synthesized
gggttgggagaggggcgatt

SEQ ID NO: 71285 - DNA, 20 bp, Artificial Sequence
  chemically synthesized
agaggggcgattgggcaacc

SEQ ID NO: 71286 - DNA, 20 bp, Artificial Sequence
  chemically synthesized
gcaacccggctgcacaaaca

SEQ ID NO: 71287 - DNA, 20 bp, Artificial Sequence
  chemically synthesized
caacccggctgcacaaacac

SEQ ID NO: 71288 - DNA, 20 bp, Artificial Sequence
  chemically synthesized
acccggctgcacaaacacgg

SEQ ID NO: 71289 - DNA, 20 bp, Artificial Sequence
  chemically synthesized
cccggctgcacaaacacggg

SEQ ID NO: 71290 - DNA, 20 bp, Artificial Sequence
  chemically synthesized
tgcacaaacacgggaggtca

SEQ ID NO: 71291 - DNA, 20 bp, Artificial Sequence
  chemically synthesized
gggaggtcaaagattgcgcc

SEQ ID NO: 71292 - DNA, 20 bp, Artificial Sequence
  chemically synthesized
aagattgcgcccagcccgcc

SEQ ID NO: 71293 - DNA, 20 bp, Artificial Sequence
  chemically synthesized
agattgcgcccagcccgccc

SEQ ID NO: 71294 - DNA, 20 bp, Artificial Sequence
  chemically synthesized
tgcgcccagcccgcccaggc

SEQ ID NO: 71295 - DNA, 20 bp, Artificial Sequence
  chemically synthesized
gcgcccagcccgcccaggcc

SEQ ID NO: 71296 - DNA, 20 bp, Artificial Sequence
  chemically synthesized
cagcccgcccaggccgggaa

SEQ ID NO: 71297 - DNA, 20 bp, Artificial Sequence
  chemically synthesized
cccaggccgggaatggaata

SEQ ID NO: 71298 - DNA, 20 bp, Artificial Sequence
  chemically synthesized
ccaggccgggaatggaataa

SEQ ID NO: 71299 - DNA, 20 bp, Artificial Sequence
  chemically synthesized
caggccgggaatggaataaa

SEQ ID NO: 71300 - DNA, 20 bp, Artificial Sequence
  chemically synthesized
gggaatggaataaagggacg

SEQ ID NO: 71301 - DNA, 20 bp, Artificial Sequence
  chemically synthesized
ggaatggaataaagggacgc

SEQ ID NO: 71302 - DNA, 20 bp, Artificial Sequence
  chemically synthesized
gaatggaataaagggacgcg

SEQ ID NO: 71303 - DNA, 20 bp, Artificial Sequence
  chemically synthesized
aataaagggacgcggggcgc

SEQ ID NO: 71304 - DNA, 20 bp, Artificial Sequence
  chemically synthesized
taaagggacgcggggcgccg

SEQ ID NO: 71305 - DNA, 20 bp, Artificial Sequence
  chemically synthesized
aaagggacgcggggcgccgg

SEQ ID NO: 71306 - DNA, 20 bp, Artificial Sequence
  chemically synthesized
gcggggcgccggaggctgca

SEQ ID NO: 71307 - DNA, 20 bp, Artificial Sequence
  chemically synthesized
gggcgccggaggctgcacag

SEQ ID NO: 71308 - DNA, 20 bp, Artificial Sequence
  chemically synthesized
gccggaggctgcacagaagc

SEQ ID NO: 71309 - DNA, 20 bp, Artificial Sequence
  chemically synthesized
gtccgactgtgctcgctgct

SEQ ID NO: 71310 - DNA, 20 bp, Artificial Sequence
  chemically synthesized
tcgctgctcagcgccgcacc

SEQ ID NO: 71311 - DNA, 20 bp, Artificial Sequence
  chemically synthesized
ctgctcagcgccgcacccgg

SEQ ID NO: 71312 - DNA, 20 bp, Artificial Sequence
  chemically synthesized
cagcgccgcacccggaagat

SEQ ID NO: 71313 - DNA, 20 bp, Artificial Sequence
  chemically synthesized
agcgccgcacccggaagatg

SEQ ID NO: 71314 - DNA, 20 bp, Artificial Sequence
  chemically synthesized
ccggaagatgaggctcgccg

SEQ ID NO: 71315 - DNA, 20 bp, Artificial Sequence
  chemically synthesized
cggaagatgaggctcgccgt

SEQ ID NO: 71316 - DNA, 20 bp, Artificial Sequence
  chemically synthesized
gaagatgaggctcgccgtgg

SEQ ID NO: 71317 - DNA, 20 bp, Artificial Sequence
  chemically synthesized
gctcgccgtgggagccctgc

SEQ ID NO: 71318 - DNA, 20 bp, Artificial Sequence
  chemically synthesized
cctgctggtctgcgccgtcc

SEQ ID NO: 71319 - DNA, 20 bp, Artificial Sequence
  chemically synthesized
ctgctggtctgcgccgtcct

SEQ ID NO: 71320 - DNA, 20 bp, Artificial Sequence
  chemically synthesized
tggtctgcgccgtcctgggt

SEQ ID NO: 71321 - DNA, 20 bp, Artificial Sequence
  chemically synthesized
tgcgccgtcctgggtgagtg

SEQ ID NO: 71322 - DNA, 20 bp, Artificial Sequence
  chemically synthesized
gcgccgtcctgggtgagtgc

SEQ ID NO: 71323 - DNA, 20 bp, Artificial Sequence
  chemically synthesized
gtcctgggtgagtgcgggca

SEQ ID NO: 71324 - DNA, 20 bp, Artificial Sequence
  chemically synthesized
tcctgggtgagtgcgggcac

SEQ ID NO: 71325 - DNA, 20 bp, Artificial Sequence
  chemically synthesized
cctgggtgagtgcgggcacg

SEQ ID NO: 71326 - DNA, 20 bp, Artificial Sequence
  chemically synthesized
gggtgagtgcgggcacgggg

SEQ ID NO: 71327 - DNA, 20 bp, Artificial Sequence
  chemically synthesized
gcgggcacggggtagcaccg

SEQ ID NO: 71328 - DNA, 20 bp, Artificial Sequence
  chemically synthesized
gggcacggggtagcaccgca

SEQ ID NO: 71329 - DNA, 20 bp, Artificial Sequence
  chemically synthesized
gggtagcaccgcagagtcgc

SEQ ID NO: 71330 - DNA, 20 bp, Artificial Sequence
  chemically synthesized
cccgcgcgttccctgcaacc

SEQ ID NO: 71331 - DNA, 20 bp, Artificial Sequence
  chemically synthesized
ccgcgcgttccctgcaaccc

SEQ ID NO: 71332 - DNA, 20 bp, Artificial Sequence
  chemically synthesized
cgcgttccctgcaacccggg

SEQ ID NO: 71333 - DNA, 20 bp, Artificial Sequence
  chemically synthesized
caacccgggcggccaccgcg

SEQ ID NO: 71334 - DNA, 20 bp, Artificial Sequence
  chemically synthesized
gcctgcatgcactccgcgct

SEQ ID NO: 71335 - DNA, 20 bp, Artificial Sequence
  chemically synthesized
cctgcatgcactccgcgctc

SEQ ID NO: 71336 - DNA, 20 bp, Artificial Sequence
  chemically synthesized
catgcactccgcgctcaggc

SEQ ID NO: 71337 - DNA, 20 bp, Artificial Sequence
  chemically synthesized
gcactccgcgctcaggctgg

SEQ ID NO: 71338 - DNA, 20 bp, Artificial Sequence
  chemically synthesized
ccgcgctcaggctggaagcc

SEQ ID NO: 71339 - DNA, 20 bp, Artificial Sequence
  chemically synthesized
cgcgctcaggctggaagcct

SEQ ID NO: 71340 - DNA, 20 bp, Artificial Sequence
  chemically synthesized
aggctggaagcctgggtgtc

SEQ ID NO: 71341 - DNA, 20 bp, Artificial Sequence
  chemically synthesized
ggctggaagcctgggtgtct

SEQ ID NO: 71342 - DNA, 20 bp, Artificial Sequence
  chemically synthesized
gcctctctacgccccacccc

SEQ ID NO: 71343 - DNA, 20 bp, Artificial Sequence
  chemically synthesized
ccccacccctggcctttgct

SEQ ID NO: 71344 - DNA, 20 bp, Artificial Sequence
  chemically synthesized
cccacccctggcctttgctt

SEQ ID NO: 71345 - DNA, 20 bp, Artificial Sequence
  chemically synthesized
ctggcctttgcttgggcttc

SEQ ID NO: 71346 - DNA, 20 bp, Artificial Sequence
  chemically synthesized
tccccctcctcctctttgtc

SEQ ID NO: 71347 - DNA, 20 bp, Artificial Sequence
  chemically synthesized
tctttgtccagtaaatcttg

SEQ ID NO: 71348 - DNA, 20 bp, Artificial Sequence
  chemically synthesized
ttgtccagtaaatcttgcag

SEQ ID NO: 71349 - DNA, 20 bp, Artificial Sequence
  chemically synthesized
agcagtgaaatacaataaat

SEQ ID NO: 71350 - DNA, 20 bp, Artificial Sequence
  chemically synthesized
cagtgaaatacaataaatca

SEQ ID NO: 71351 - DNA, 20 bp, Artificial Sequence
  chemically synthesized
taaatcagagcacgtctaac

SEQ ID NO: 71352 - DNA, 20 bp, Artificial Sequence
  chemically synthesized
aaatcagagcacgtctaacc

SEQ ID NO: 71353 - DNA, 20 bp, Artificial Sequence
  chemically synthesized
ctttgctgctgcctcttgtc

SEQ ID NO: 71354 - DNA, 20 bp, Artificial Sequence
  chemically synthesized
cttgtcaagtccgaactcct

SEQ ID NO: 71355 - DNA, 20 bp, Artificial Sequence
  chemically synthesized
caagtccgaactccttagca

SEQ ID NO: 71356 - DNA, 20 bp, Artificial Sequence
  chemically synthesized
aactccttagcatggcattc

SEQ ID NO: 71357 - DNA, 20 bp, Artificial Sequence
  chemically synthesized
actccttagcatggcattca

SEQ ID NO: 71358 - DNA, 20 bp, Artificial Sequence
  chemically synthesized
gcatggcattcaaggcctcc

SEQ ID NO: 71359 - DNA, 20 bp, Artificial Sequence
  chemically synthesized
catggcattcaaggcctccc

SEQ ID NO: 71360 - DNA, 20 bp, Artificial Sequence
  chemically synthesized
gggtctgaccattccccttt

SEQ ID NO: 71361 - DNA, 20 bp, Artificial Sequence
  chemically synthesized
gtctgaccattcccctttca

SEQ ID NO: 71362 - DNA, 20 bp, Artificial Sequence
  chemically synthesized
tctgaccattcccctttcag

SEQ ID NO: 71363 - DNA, 20 bp, Artificial Sequence
  chemically synthesized
tttcagaggctgatgtcccc

SEQ ID NO: 71364 - DNA, 20 bp, Artificial Sequence
  chemically synthesized
ttcagaggctgatgtcccct

SEQ ID NO: 71365 - DNA, 20 bp, Artificial Sequence
  chemically synthesized
ctgatgtcccctgggtgccc

SEQ ID NO: 71366 - DNA, 20 bp, Artificial Sequence
  chemically synthesized
tgatgtcccctgggtgccct

SEQ ID NO: 71367 - DNA, 20 bp, Artificial Sequence
  chemically synthesized
atgtcccctgggtgccctgg

SEQ ID NO: 71368 - DNA, 20 bp, Artificial Sequence
  chemically synthesized
cctgggtgccctgggagctg

SEQ ID NO: 71369 - DNA, 20 bp, Artificial Sequence
  chemically synthesized
ggagctgtagatgtcctgcc

SEQ ID NO: 71370 - DNA, 20 bp, Artificial Sequence
  chemically synthesized
gagctgtagatgtcctgcca

SEQ ID NO: 71371 - DNA, 20 bp, Artificial Sequence
  chemically synthesized
ctgtagatgtcctgccaagg

SEQ ID NO: 71372 - DNA, 20 bp, Artificial Sequence
  chemically synthesized
tagatgtcctgccaaggaag

SEQ ID NO: 71373 - DNA, 20 bp, Artificial Sequence
  chemically synthesized
gccaaggaagcggtgccatc

SEQ ID NO: 71374 - DNA, 20 bp, Artificial Sequence
  chemically synthesized
aaggaagcggtgccatcgag

SEQ ID NO: 71375 - DNA, 20 bp, Artificial Sequence
  chemically synthesized
aagcggtgccatcgagcggt

SEQ ID NO: 71376 - DNA, 20 bp, Artificial Sequence
  chemically synthesized
gcggtgccatcgagcggtca

SEQ ID NO: 71377 - DNA, 20 bp, Artificial Sequence
  chemically synthesized
gccatcgagcggtcagagca

SEQ ID NO: 71378 - DNA, 20 bp, Artificial Sequence
  chemically synthesized
ccatcgagcggtcagagcat

SEQ ID NO: 71379 - DNA, 20 bp, Artificial Sequence
  chemically synthesized
catcgagcggtcagagcatg

SEQ ID NO: 71380 - DNA, 20 bp, Artificial Sequence
  chemically synthesized
cggtcagagcatggggtttg

SEQ ID NO: 71381 - DNA, 20 bp, Artificial Sequence
  chemically synthesized
cagagcatggggtttgaagc

SEQ ID NO: 71382 - DNA, 20 bp, Artificial Sequence
  chemically synthesized
gggtttgaagccagacttct

SEQ ID NO: 71383 - DNA, 20 bp, Artificial Sequence
  chemically synthesized
aagccagacttcttggatcc

SEQ ID NO: 71384 - DNA, 20 bp, Artificial Sequence
  chemically synthesized
gacttcttggatccaagtcc

SEQ ID NO: 71385 - DNA, 20 bp, Artificial Sequence
  chemically synthesized
tcttggatccaagtcctggc

SEQ ID NO: 71386 - DNA, 20 bp, Artificial Sequence
  chemically synthesized
agtcctggccggctcctcac

SEQ ID NO: 71387 - DNA, 20 bp, Artificial Sequence
  chemically synthesized
gtcctggccggctcctcacc

SEQ ID NO: 71388 - DNA, 20 bp, Artificial Sequence
  chemically synthesized
tcctggccggctcctcacca

SEQ ID NO: 71389 - DNA, 20 bp, Artificial Sequence
  chemically synthesized
ctggccggctcctcaccagg

SEQ ID NO: 71390 - DNA, 20 bp, Artificial Sequence
  chemically synthesized
tggccggctcctcaccaggg

SEQ ID NO: 71391 - DNA, 20 bp, Artificial Sequence
  chemically synthesized
ggccggctcctcaccaggga

SEQ ID NO: 71392 - DNA, 20 bp, Artificial Sequence
  chemically synthesized
gccggctcctcaccagggag

SEQ ID NO: 71393 - DNA, 20 bp, Artificial Sequence
  chemically synthesized
ccggctcctcaccagggagg

SEQ ID NO: 71394 - DNA, 20 bp, Artificial Sequence
  chemically synthesized
caccagggagggggtcatca

SEQ ID NO: 71395 - DNA, 20 bp, Artificial Sequence
  chemically synthesized
gggtcatcacagcacttgcc

SEQ ID NO: 71396 - DNA, 20 bp, Artificial Sequence
  chemically synthesized
ggtcatcacagcacttgcct

SEQ ID NO: 71397 - DNA, 20 bp, Artificial Sequence
  chemically synthesized
tcatcacagcacttgcctgg

SEQ ID NO: 71398 - DNA, 20 bp, Artificial Sequence
  chemically synthesized
catcacagcacttgcctggg

SEQ ID NO: 71399 - DNA, 20 bp, Artificial Sequence
  chemically synthesized
atcacagcacttgcctggga

SEQ ID NO: 71400 - DNA, 20 bp, Artificial Sequence
  chemically synthesized
cttgcctgggagggtcaaat

SEQ ID NO: 71401 - DNA, 20 bp, Artificial Sequence
  chemically synthesized
ttgcctgggagggtcaaatg

SEQ ID NO: 71402 - DNA, 20 bp, Artificial Sequence
  chemically synthesized
tgcctgggagggtcaaatga

SEQ ID NO: 71403 - DNA, 20 bp, Artificial Sequence
  chemically synthesized
tgggagggtcaaatgagggt

SEQ ID NO: 71404 - DNA, 20 bp, Artificial Sequence
  chemically synthesized
agggtcaaatgagggtcagc

SEQ ID NO: 71405 - DNA, 20 bp, Artificial Sequence
  chemically synthesized
gggtcaaatgagggtcagcg

SEQ ID NO: 71406 - DNA, 20 bp, Artificial Sequence
  chemically synthesized
tcaaatgagggtcagcgagg

SEQ ID NO: 71407 - DNA, 20 bp, Artificial Sequence
  chemically synthesized
aatgagggtcagcgaggtgg

SEQ ID NO: 71408 - DNA, 20 bp, Artificial Sequence
  chemically synthesized
tcagcgaggtggcagatgct

SEQ ID NO: 71409 - DNA, 20 bp, Artificial Sequence
  chemically synthesized
aggtggcagatgctgagtac

SEQ ID NO: 71410 - DNA, 20 bp, Artificial Sequence
  chemically synthesized
tggcagatgctgagtaccag

SEQ ID NO: 71411 - DNA, 20 bp, Artificial Sequence
  chemically synthesized
cagatgctgagtaccagtgg

SEQ ID NO: 71412 - DNA, 20 bp, Artificial Sequence
  chemically synthesized
atgttgcacacatcctgcta

SEQ ID NO: 71413 - DNA, 20 bp, Artificial Sequence
  chemically synthesized
tgttgcacacatcctgctat

SEQ ID NO: 71414 - DNA, 20 bp, Artificial Sequence
  chemically synthesized
gttgcacacatcctgctatg

SEQ ID NO: 71415 - DNA, 20 bp, Artificial Sequence
  chemically synthesized
gcacacatcctgctatgggg

SEQ ID NO: 71416 - DNA, 20 bp, Artificial Sequence
  chemically synthesized
cacatcctgctatggggcag

SEQ ID NO: 71417 - DNA, 20 bp, Artificial Sequence
  chemically synthesized
gccacactccccgacctcct

SEQ ID NO: 71418 - DNA, 20 bp, Artificial Sequence
  chemically synthesized
ccacactccccgacctcctg

SEQ ID NO: 71419 - DNA, 20 bp, Artificial Sequence
  chemically synthesized
cactccccgacctcctgagg

SEQ ID NO: 71420 - DNA, 20 bp, Artificial Sequence
  chemically synthesized
actccccgacctcctgaggt

SEQ ID NO: 71421 - DNA, 20 bp, Artificial Sequence
  chemically synthesized
ctccccgacctcctgaggtg

SEQ ID NO: 71422 - DNA, 20 bp, Artificial Sequence
  chemically synthesized
taacttctgcctgccattca

SEQ ID NO: 71423 - DNA, 20 bp, Artificial Sequence
  chemically synthesized
aacttctgcctgccattcat

SEQ ID NO: 71424 - DNA, 20 bp, Artificial Sequence
  chemically synthesized
acttctgcctgccattcatg

SEQ ID NO: 71425 - DNA, 20 bp, Artificial Sequence
  chemically synthesized
tggggcatttgtcacactgt

SEQ ID NO: 71426 - DNA, 20 bp, Artificial Sequence
  chemically synthesized
ggggcatttgtcacactgtt

SEQ ID NO: 71427 - DNA, 20 bp, Artificial Sequence
  chemically synthesized
gggcatttgtcacactgttg

SEQ ID NO: 71428 - DNA, 20 bp, Artificial Sequence
  chemically synthesized
actgttggggcttccacgtt

SEQ ID NO: 71429 - DNA, 20 bp, Artificial Sequence
  chemically synthesized
gtttagttttctctccccat

SEQ ID NO: 71430 - DNA, 20 bp, Artificial Sequence
  chemically synthesized
agttttctctccccataagc

SEQ ID NO: 71431 - DNA, 20 bp, Artificial Sequence
  chemically synthesized
ccataagctagcaattcctt

SEQ ID NO: 71432 - DNA, 20 bp, Artificial Sequence
  chemically synthesized
ataagctagcaattccttga

SEQ ID NO: 71433 - DNA, 20 bp, Artificial Sequence
  chemically synthesized
aagctagcaattccttgaga

SEQ ID NO: 71434 - DNA, 20 bp, Artificial Sequence
  chemically synthesized
agctagcaattccttgagag

SEQ ID NO: 71435 - DNA, 20 bp, Artificial Sequence
  chemically synthesized
tacttgcctttatccccgca

SEQ ID NO: 71436 - DNA, 20 bp, Artificial Sequence
  chemically synthesized
cttgcctttatccccgcaca

SEQ ID NO: 71437 - DNA, 20 bp, Artificial Sequence
  chemically synthesized
tccccgcacagagcacttca

SEQ ID NO: 71438 - DNA, 20 bp, Artificial Sequence
  chemically synthesized
ccccgcacagagcacttcac

SEQ ID NO: 71439 - DNA, 20 bp, Artificial Sequence
  chemically synthesized
gagcacttcacaggctgtgc

SEQ ID NO: 71440 - DNA, 20 bp, Artificial Sequence
  chemically synthesized
agcacttcacaggctgtgca

SEQ ID NO: 71441 - DNA, 20 bp, Artificial Sequence
  chemically synthesized
gtgcaaggtaatgctccact

SEQ ID NO: 71442 - DNA, 20 bp, Artificial Sequence
  chemically synthesized
tgcaaggtaatgctccactg

SEQ ID NO: 71443 - DNA, 20 bp, Artificial Sequence
  chemically synthesized
tgaggacacattctcgccta

SEQ ID NO: 71444 - DNA, 20 bp, Artificial Sequence
  chemically synthesized
gaggacacattctcgcctat

SEQ ID NO: 71445 - DNA, 20 bp, Artificial Sequence
  chemically synthesized
attctcgcctatgggaactc

SEQ ID NO: 71446 - DNA, 20 bp, Artificial Sequence
  chemically synthesized
tctcgcctatgggaactctg

SEQ ID NO: 71447 - DNA, 20 bp, Artificial Sequence
  chemically synthesized
ctcgcctatgggaactctgg

SEQ ID NO: 71448 - DNA, 20 bp, Artificial Sequence
  chemically synthesized
gcctatgggaactctggagg

SEQ ID NO: 71449 - DNA, 20 bp, Artificial Sequence
  chemically synthesized
cctatgggaactctggaggc

SEQ ID NO: 71450 - DNA, 20 bp, Artificial Sequence
  chemically synthesized
ctatgggaactctggaggca

SEQ ID NO: 71451 - DNA, 20 bp, Artificial Sequence
  chemically synthesized
actctggaggcagggctttg

SEQ ID NO: 71452 - DNA, 20 bp, Artificial Sequence
  chemically synthesized
tctggaggcagggctttgtg

SEQ ID NO: 71453 - DNA, 20 bp, Artificial Sequence
  chemically synthesized
ctggaggcagggctttgtgg

SEQ ID NO: 71454 - DNA, 20 bp, Artificial Sequence
  chemically synthesized
tggaggcagggctttgtgga

SEQ ID NO: 71455 - DNA, 20 bp, Artificial Sequence
  chemically synthesized
ggaggcagggctttgtggag

SEQ ID NO: 71456 - DNA, 20 bp, Artificial Sequence
  chemically synthesized
gctttgtggaggggctgcca

SEQ ID NO: 71457 - DNA, 20 bp, Artificial Sequence
  chemically synthesized
ctttgtggaggggctgccac

SEQ ID NO: 71458 - DNA, 20 bp, Artificial Sequence
  chemically synthesized
cacaggcttatgttgcctcc

SEQ ID NO: 71459 - DNA, 20 bp, Artificial Sequence
  chemically synthesized
acaggcttatgttgcctcct

SEQ ID NO: 71460 - DNA, 20 bp, Artificial Sequence
  chemically synthesized
ttgcctcctaggatttccca

SEQ ID NO: 71461 - DNA, 20 bp, Artificial Sequence
  chemically synthesized
tgcctcctaggatttcccat

SEQ ID NO: 71462 - DNA, 20 bp, Artificial Sequence
  chemically synthesized
cctaggatttcccatgggcc

SEQ ID NO: 71463 - DNA, 20 bp, Artificial Sequence
  chemically synthesized
taggatttcccatgggccaa

SEQ ID NO: 71464 - DNA, 20 bp, Artificial Sequence
  chemically synthesized
aggatttcccatgggccaag

SEQ ID NO: 71465 - DNA, 20 bp, Artificial Sequence
  chemically synthesized
ggatttcccatgggccaaga

SEQ ID NO: 71466 - DNA, 20 bp, Artificial Sequence
  chemically synthesized
ccatgggccaagagggaaaa

SEQ ID NO: 71467 - DNA, 20 bp, Artificial Sequence
  chemically synthesized
catgggccaagagggaaaat

SEQ ID NO: 71468 - DNA, 20 bp, Artificial Sequence
  chemically synthesized
atgggccaagagggaaaatg

SEQ ID NO: 71469 - DNA, 20 bp, Artificial Sequence
  chemically synthesized
tgggccaagagggaaaatgg

SEQ ID NO: 71470 - DNA, 20 bp, Artificial Sequence
  chemically synthesized
agagggaaaatgggggtcgc

SEQ ID NO: 71471 - DNA, 20 bp, Artificial Sequence
  chemically synthesized
gagggaaaatgggggtcgct

SEQ ID NO: 71472 - DNA, 20 bp, Artificial Sequence
  chemically synthesized
agggaaaatgggggtcgctg

SEQ ID NO: 71473 - DNA, 20 bp, Artificial Sequence
  chemically synthesized
gaaaatgggggtcgctgggg

SEQ ID NO: 71474 - DNA, 20 bp, Artificial Sequence
  chemically synthesized
gtcgctggggtggccatccc

SEQ ID NO: 71475 - DNA, 20 bp, Artificial Sequence
  chemically synthesized
gctggggtggccatccctgg

SEQ ID NO: 71476 - DNA, 20 bp, Artificial Sequence
  chemically synthesized
tggcccctcctcatgcatcc

SEQ ID NO: 71477 - DNA, 20 bp, Artificial Sequence
  chemically synthesized
gcccctcctcatgcatcctg

SEQ ID NO: 71478 - DNA, 20 bp, Artificial Sequence
  chemically synthesized
ccctcctcatgcatcctgga

SEQ ID NO: 71479 - DNA, 20 bp, Artificial Sequence
  chemically synthesized
tcatgcatcctggagagctg

SEQ ID NO: 71480 - DNA, 20 bp, Artificial Sequence
  chemically synthesized
catgcatcctggagagctgt

SEQ ID NO: 71481 - DNA, 20 bp, Artificial Sequence
  chemically synthesized
agctgtgggcctcctctcca

SEQ ID NO: 71482 - DNA, 20 bp, Artificial Sequence
  chemically synthesized
gctgtgggcctcctctccac

SEQ ID NO: 71483 - DNA, 20 bp, Artificial Sequence
  chemically synthesized
cctcctctccacaggctttg

SEQ ID NO: 71484 - DNA, 20 bp, Artificial Sequence
  chemically synthesized
caggctttgtggatcttctt

SEQ ID NO: 71485 - DNA, 20 bp, Artificial Sequence
  chemically synthesized
ggctttgtggatcttcttca

SEQ ID NO: 71486 - DNA, 20 bp, Artificial Sequence
  chemically synthesized
ttgtggatcttcttcagagc

SEQ ID NO: 71487 - DNA, 20 bp, Artificial Sequence
  chemically synthesized
ggatcttcttcagagccagt

SEQ ID NO: 71488 - DNA, 20 bp, Artificial Sequence
  chemically synthesized
cttcttcagagccagtgagt

SEQ ID NO: 71489 - DNA, 20 bp, Artificial Sequence
  chemically synthesized
ccagtgagtcagccttgctg

SEQ ID NO: 71490 - DNA, 20 bp, Artificial Sequence
  chemically synthesized
gtgagtcagccttgctgtgg

SEQ ID NO: 71491 - DNA, 20 bp, Artificial Sequence
  chemically synthesized
gccttgctgtggtggcccac

SEQ ID NO: 71492 - DNA, 20 bp, Artificial Sequence
  chemically synthesized
ccttgctgtggtggcccaca

SEQ ID NO: 71493 - DNA, 20 bp, Artificial Sequence
  chemically synthesized
ttgctgtggtggcccacaag

SEQ ID NO: 71494 - DNA, 20 bp, Artificial Sequence
  chemically synthesized
ctgtggtggcccacaaggag

SEQ ID NO: 71495 - DNA, 20 bp, Artificial Sequence
  chemically synthesized
gtggtggcccacaaggagtg

SEQ ID NO: 71496 - DNA, 20 bp, Artificial Sequence
  chemically synthesized
cccacaaggagtggagatga

SEQ ID NO: 71497 - DNA, 20 bp, Artificial Sequence
  chemically synthesized
cacaaggagtggagatgaca

SEQ ID NO: 71498 - DNA, 20 bp, Artificial Sequence
  chemically synthesized
acaaggagtggagatgacag

SEQ ID NO: 71499 - DNA, 20 bp, Artificial Sequence
  chemically synthesized
caaggagtggagatgacaga

SEQ ID NO: 71500 - DNA, 20 bp, Artificial Sequence
  chemically synthesized
gtggagatgacagagggcct

SEQ ID NO: 71501 - DNA, 20 bp, Artificial Sequence
  chemically synthesized
tggagatgacagagggcctt

SEQ ID NO: 71502 - DNA, 20 bp, Artificial Sequence
  chemically synthesized
ggagatgacagagggccttg

SEQ ID NO: 71503 - DNA, 20 bp, Artificial Sequence
  chemically synthesized
atgacagagggccttgggga

SEQ ID NO: 71504 - DNA, 20 bp, Artificial Sequence
  chemically synthesized
tgacagagggccttggggac

SEQ ID NO: 71505 - DNA, 20 bp, Artificial Sequence
  chemically synthesized
gacagagggccttggggaca

SEQ ID NO: 71506 - DNA, 20 bp, Artificial Sequence
  chemically synthesized
gggccttggggacagggcaa

SEQ ID NO: 71507 - DNA, 20 bp, Artificial Sequence
  chemically synthesized
cagggcaaaagctcatgtga

SEQ ID NO: 71508 - DNA, 20 bp, Artificial Sequence
  chemically synthesized
agggcaaaagctcatgtgat

SEQ ID NO: 71509 - DNA, 20 bp, Artificial Sequence
  chemically synthesized
gggcaaaagctcatgtgata

SEQ ID NO: 71510 - DNA, 20 bp, Artificial Sequence
  chemically synthesized
atgctgtctctgcaaccaca

SEQ ID NO: 71511 - DNA, 20 bp, Artificial Sequence
  chemically synthesized
tgcaaccacatggattttaa

SEQ ID NO: 71512 - DNA, 20 bp, Artificial Sequence
  chemically synthesized
tggattttaatagttaccca

SEQ ID NO: 71513 - DNA, 20 bp, Artificial Sequence
  chemically synthesized
ttttaatagttacccatggc

SEQ ID NO: 71514 - DNA, 20 bp, Artificial Sequence
  chemically synthesized
tagttacccatggctggctt

SEQ ID NO: 71515 - DNA, 20 bp, Artificial Sequence
  chemically synthesized
gcttcagctttttttgtgaa

SEQ ID NO: 71516 - DNA, 20 bp, Artificial Sequence
  chemically synthesized
tcagctttttttgtgaatgg

SEQ ID NO: 71517 - DNA, 20 bp, Artificial Sequence
  chemically synthesized
ttttgtgaatggcagccaaa

SEQ ID NO: 71518 - DNA, 20 bp, Artificial Sequence
  chemically synthesized
tgaatggcagccaaaaagtg

SEQ ID NO: 71519 - DNA, 20 bp, Artificial Sequence
  chemically synthesized
gccaaaaagtgtggtgaaaa

SEQ ID NO: 71520 - DNA, 20 bp, Artificial Sequence
  chemically synthesized
caaaaagtgtggtgaaaatg

SEQ ID NO: 71521 - DNA, 20 bp, Artificial Sequence
  chemically synthesized
aaaaagtgtggtgaaaatgg

SEQ ID NO: 71522 - DNA, 20 bp, Artificial Sequence
  chemically synthesized
aaaagtgtggtgaaaatgga

SEQ ID NO: 71523 - DNA, 20 bp, Artificial Sequence
  chemically synthesized
gtgtggtgaaaatggaggga

SEQ ID NO: 71524 - DNA, 20 bp, Artificial Sequence
  chemically synthesized
gtgaaaatggagggatagtt

SEQ ID NO: 71525 - DNA, 20 bp, Artificial Sequence
  chemically synthesized
aaaatggagggatagttcag

SEQ ID NO: 71526 - DNA, 20 bp, Artificial Sequence
  chemically synthesized
aatggagggatagttcagtg

SEQ ID NO: 71527 - DNA, 20 bp, Artificial Sequence
  chemically synthesized
gagggatagttcagtggaga

SEQ ID NO: 71528 - DNA, 20 bp, Artificial Sequence
  chemically synthesized
gggatagttcagtggagaca

SEQ ID NO: 71529 - DNA, 20 bp, Artificial Sequence
  chemically synthesized
ggatagttcagtggagacag

SEQ ID NO: 71530 - DNA, 20 bp, Artificial Sequence
  chemically synthesized
gatagttcagtggagacaga

SEQ ID NO: 71531 - DNA, 20 bp, Artificial Sequence
  chemically synthesized
atagttcagtggagacagag

SEQ ID NO: 71532 - DNA, 20 bp, Artificial Sequence
  chemically synthesized
agttcagtggagacagaggg

SEQ ID NO: 71533 - DNA, 20 bp, Artificial Sequence
  chemically synthesized
aggggagactgttgaatttg

SEQ ID NO: 71534 - DNA, 20 bp, Artificial Sequence
  chemically synthesized
gggagactgttgaatttgtg

SEQ ID NO: 71535 - DNA, 20 bp, Artificial Sequence
  chemically synthesized
tgttgaatttgtggagtttt

SEQ ID NO: 71536 - DNA, 20 bp, Artificial Sequence
  chemically synthesized
agtttttagttcttcctaaa

SEQ ID NO: 71537 - DNA, 20 bp, Artificial Sequence
  chemically synthesized
tttttagttcttcctaaaca

SEQ ID NO: 71538 - DNA, 20 bp, Artificial Sequence
  chemically synthesized
tttagttcttcctaaacaga

SEQ ID NO: 71539 - DNA, 20 bp, Artificial Sequence
  chemically synthesized
tcttcctaaacagagagcaa

SEQ ID NO: 71540 - DNA, 20 bp, Artificial Sequence
  chemically synthesized
ctaaacagagagcaacagac

SEQ ID NO: 71541 - DNA, 20 bp, Artificial Sequence
  chemically synthesized
aaacagagagcaacagacaa

SEQ ID NO: 71542 - DNA, 20 bp, Artificial Sequence
  chemically synthesized
agagcaacagacaagagtta

SEQ ID NO: 71543 - DNA, 20 bp, Artificial Sequence
  chemically synthesized
gttaatttaccctcaactac

SEQ ID NO: 71544 - DNA, 20 bp, Artificial Sequence
  chemically synthesized
tttaccctcaactactggcc

SEQ ID NO: 71545 - DNA, 20 bp, Artificial Sequence
  chemically synthesized
accctcaactactggccaag

SEQ ID NO: 71546 - DNA, 20 bp, Artificial Sequence
  chemically synthesized
ccctcaactactggccaaga

SEQ ID NO: 71547 - DNA, 20 bp, Artificial Sequence
  chemically synthesized
cctcaactactggccaagaa

SEQ ID NO: 71548 - DNA, 20 bp, Artificial Sequence
  chemically synthesized
ctcaactactggccaagaag

SEQ ID NO: 71549 - DNA, 20 bp, Artificial Sequence
  chemically synthesized
ggccaagaaggggtgtaact

SEQ ID NO: 71550 - DNA, 20 bp, Artificial Sequence
  chemically synthesized
gttttcttcttttgtgccct

SEQ ID NO: 71551 - DNA, 20 bp, Artificial Sequence
  chemically synthesized
ttcttcttttgtgccctgag

SEQ ID NO: 71552 - DNA, 20 bp, Artificial Sequence
  chemically synthesized
ttcttttgtgccctgagtag

SEQ ID NO: 71553 - DNA, 20 bp, Artificial Sequence
  chemically synthesized
tgtgccctgagtagcagacc

SEQ ID NO: 71554 - DNA, 20 bp, Artificial Sequence
  chemically synthesized
tgccctgagtagcagaccca

SEQ ID NO: 71555 - DNA, 20 bp, Artificial Sequence
  chemically synthesized
tgagtagcagacccagagtc

SEQ ID NO: 71556 - DNA, 20 bp, Artificial Sequence
  chemically synthesized
agtagcagacccagagtctg

SEQ ID NO: 71557 - DNA, 20 bp, Artificial Sequence
  chemically synthesized
agacccagagtctggagacc

SEQ ID NO: 71558 - DNA, 20 bp, Artificial Sequence
  chemically synthesized
gagtctggagacccagattc

SEQ ID NO: 71559 - DNA, 20 bp, Artificial Sequence
  chemically synthesized
agtctggagacccagattct

SEQ ID NO: 71560 - DNA, 20 bp, Artificial Sequence
  chemically synthesized
ggagacccagattctaggcc

SEQ ID NO: 71561 - DNA, 20 bp, Artificial Sequence
  chemically synthesized
cccagattctaggcctggct

SEQ ID NO: 71562 - DNA, 20 bp, Artificial Sequence
  chemically synthesized
ggcctggcttggccaacgac

SEQ ID NO: 71563 - DNA, 20 bp, Artificial Sequence
  chemically synthesized
ctggcttggccaacgacaag

SEQ ID NO: 71564 - DNA, 20 bp, Artificial Sequence
  chemically synthesized
tggcttggccaacgacaagc

SEQ ID NO: 71565 - DNA, 20 bp, Artificial Sequence
  chemically synthesized
ggcttggccaacgacaagca

SEQ ID NO: 71566 - DNA, 20 bp, Artificial Sequence
  chemically synthesized
aacgacaagcagggtgacct

SEQ ID NO: 71567 - DNA, 20 bp, Artificial Sequence
  chemically synthesized
acgacaagcagggtgacctt

SEQ ID NO: 71568 - DNA, 20 bp, Artificial Sequence
  chemically synthesized
ccttgggttaaaaaaaaaaa

SEQ ID NO: 71569 - DNA, 20 bp, Artificial Sequence
  chemically synthesized
cttgggttaaaaaaaaaaaa

SEQ ID NO: 71570 - DNA, 20 bp, Artificial Sequence
  chemically synthesized
aaaaaaaggcatcattctct

SEQ ID NO: 71571 - DNA, 20 bp, Artificial Sequence
  chemically synthesized
tctcactccctcttctcaaa

SEQ ID NO: 71572 - DNA, 20 bp, Artificial Sequence
  chemically synthesized
actccctcttctcaaaaaga

SEQ ID NO: 71573 - DNA, 20 bp, Artificial Sequence
  chemically synthesized
gatggcaattcctcccccgc

SEQ ID NO: 71574 - DNA, 20 bp, Artificial Sequence
  chemically synthesized
cctcccccgctggttttcca

SEQ ID NO: 71575 - DNA, 20 bp, Artificial Sequence
  chemically synthesized
cccgctggttttccatagtt

SEQ ID NO: 71576 - DNA, 20 bp, Artificial Sequence
  chemically synthesized
ccgctggttttccatagttg

SEQ ID NO: 71577 - DNA, 20 bp, Artificial Sequence
  chemically synthesized
ctggttttccatagttgagg

SEQ ID NO: 71578 - DNA, 20 bp, Artificial Sequence
  chemically synthesized
ttttccatagttgaggtagc

SEQ ID NO: 71579 - DNA, 20 bp, Artificial Sequence
  chemically synthesized
gaggtagcaagccaatgtgt

SEQ ID NO: 71580 - DNA, 20 bp, Artificial Sequence
  chemically synthesized
aggtagcaagccaatgtgtt

SEQ ID NO: 71581 - DNA, 20 bp, Artificial Sequence
  chemically synthesized
ggtagcaagccaatgtgttg

SEQ ID NO: 71582 - DNA, 20 bp, Artificial Sequence
  chemically synthesized
agcaagccaatgtgttgggg

SEQ ID NO: 71583 - DNA, 20 bp, Artificial Sequence
  chemically synthesized
gaaaacgccctgtgcatact

SEQ ID NO: 71584 - DNA, 20 bp, Artificial Sequence
  chemically synthesized
aaaacgccctgtgcatactg

SEQ ID NO: 71585 - DNA, 20 bp, Artificial Sequence
  chemically synthesized
atactgaggcttatgttcca

SEQ ID NO: 71586 - DNA, 20 bp, Artificial Sequence
  chemically synthesized
tactgaggcttatgttccat

SEQ ID NO: 71587 - DNA, 20 bp, Artificial Sequence
  chemically synthesized
actgaggcttatgttccatg

SEQ ID NO: 71588 - DNA, 20 bp, Artificial Sequence
  chemically synthesized
ctgaggcttatgttccatgg

SEQ ID NO: 71589 - DNA, 20 bp, Artificial Sequence
  chemically synthesized
tgaggcttatgttccatggg

SEQ ID NO: 71590 - DNA, 20 bp, Artificial Sequence
  chemically synthesized
gcttatgttccatggggggc

SEQ ID NO: 71591 - DNA, 20 bp, Artificial Sequence
  chemically synthesized
cttatgttccatggggggcc

SEQ ID NO: 71592 - DNA, 20 bp, Artificial Sequence
  chemically synthesized
ttatgttccatggggggcca

SEQ ID NO: 71593 - DNA, 20 bp, Artificial Sequence
  chemically synthesized
tatgttccatggggggccag

SEQ ID NO: 71594 - DNA, 20 bp, Artificial Sequence
  chemically synthesized
ttccatggggggccaggggc

SEQ ID NO: 71595 - DNA, 20 bp, Artificial Sequence
  chemically synthesized
tccatggggggccaggggcc

SEQ ID NO: 71596 - DNA, 20 bp, Artificial Sequence
  chemically synthesized
tggggggccaggggccagga

SEQ ID NO: 71597 - DNA, 20 bp, Artificial Sequence
  chemically synthesized
gccaggggccaggacagtga

SEQ ID NO: 71598 - DNA, 20 bp, Artificial Sequence
  chemically synthesized
ccaggggccaggacagtgat

SEQ ID NO: 71599 - DNA, 20 bp, Artificial Sequence
  chemically synthesized
aggggccaggacagtgatgg

SEQ ID NO: 71600 - DNA, 20 bp, Artificial Sequence
  chemically synthesized
ggggccaggacagtgatggg

SEQ ID NO: 71601 - DNA, 20 bp, Artificial Sequence
  chemically synthesized
ggccaggacagtgatgggag

SEQ ID NO: 71602 - DNA, 20 bp, Artificial Sequence
  chemically synthesized
ggacagtgatgggaggagac

SEQ ID NO: 71603 - DNA, 20 bp, Artificial Sequence
  chemically synthesized
gacagtgatgggaggagaca

SEQ ID NO: 71604 - DNA, 20 bp, Artificial Sequence
  chemically synthesized
agtgatgggaggagacaagg

SEQ ID NO: 71605 - DNA, 20 bp, Artificial Sequence
  chemically synthesized
gggaggagacaaggcggata

SEQ ID NO: 71606 - DNA, 20 bp, Artificial Sequence
  chemically synthesized
gaggagacaaggcggataca

SEQ ID NO: 71607 - DNA, 20 bp, Artificial Sequence
  chemically synthesized
aggagacaaggcggatacag

SEQ ID NO: 71608 - DNA, 20 bp, Artificial Sequence
  chemically synthesized
gagacaaggcggatacagag

SEQ ID NO: 71609 - DNA, 20 bp, Artificial Sequence
  chemically synthesized
acaaggcggatacagaggag

SEQ ID NO: 71610 - DNA, 20 bp, Artificial Sequence
  chemically synthesized
gaggagcagattgtcatctc

SEQ ID NO: 71611 - DNA, 20 bp, Artificial Sequence
  chemically synthesized
agcagattgtcatctccagc

SEQ ID NO: 71612 - DNA, 20 bp, Artificial Sequence
  chemically synthesized
gcagattgtcatctccagct

SEQ ID NO: 71613 - DNA, 20 bp, Artificial Sequence
  chemically synthesized
agattgtcatctccagctgg

SEQ ID NO: 71614 - DNA, 20 bp, Artificial Sequence
  chemically synthesized
gattgtcatctccagctggg

SEQ ID NO: 71615 - DNA, 20 bp, Artificial Sequence
  chemically synthesized
catctccagctgggaggtga

SEQ ID NO: 71616 - DNA, 20 bp, Artificial Sequence
  chemically synthesized
tggccatgcctgcacccctc

SEQ ID NO: 71617 - DNA, 20 bp, Artificial Sequence
  chemically synthesized
catgcctgcacccctctggc

SEQ ID NO: 71618 - DNA, 20 bp, Artificial Sequence
  chemically synthesized
gcctgcacccctctggccag

SEQ ID NO: 71619 - DNA, 20 bp, Artificial Sequence
  chemically synthesized
ctgcacccctctggccagca

SEQ ID NO: 71620 - DNA, 20 bp, Artificial Sequence
  chemically synthesized
tgcacccctctggccagcag

SEQ ID NO: 71621 - DNA, 20 bp, Artificial Sequence
  chemically synthesized
gcacccctctggccagcaga

SEQ ID NO: 71622 - DNA, 20 bp, Artificial Sequence
  chemically synthesized
cccctctggccagcagaggg

SEQ ID NO: 71623 - DNA, 20 bp, Artificial Sequence
  chemically synthesized
tctggccagcagagggtggt

SEQ ID NO: 71624 - DNA, 20 bp, Artificial Sequence
  chemically synthesized
ggccagcagagggtggtcag

SEQ ID NO: 71625 - DNA, 20 bp, Artificial Sequence
  chemically synthesized
gccagcagagggtggtcagt

SEQ ID NO: 71626 - DNA, 20 bp, Artificial Sequence
  chemically synthesized
gagggtggtcagtaggaaac

SEQ ID NO: 71627 - DNA, 20 bp, Artificial Sequence
  chemically synthesized
agggtggtcagtaggaaact

SEQ ID NO: 71628 - DNA, 20 bp, Artificial Sequence
  chemically synthesized
ggtggtcagtaggaaactgg

SEQ ID NO: 71629 - DNA, 20 bp, Artificial Sequence
  chemically synthesized
gtggtcagtaggaaactggg

SEQ ID NO: 71630 - DNA, 20 bp, Artificial Sequence
  chemically synthesized
gtaggaaactgggaggccat

SEQ ID NO: 71631 - DNA, 20 bp, Artificial Sequence
  chemically synthesized
taggaaactgggaggccatt

SEQ ID NO: 71632 - DNA, 20 bp, Artificial Sequence
  chemically synthesized
aggaaactgggaggccatta

SEQ ID NO: 71633 - DNA, 20 bp, Artificial Sequence
  chemically synthesized
ccattagggcaaccttctat

SEQ ID NO: 71634 - DNA, 20 bp, Artificial Sequence
  chemically synthesized
agggcaaccttctattggct

SEQ ID NO: 71635 - DNA, 20 bp, Artificial Sequence
  chemically synthesized
accttctattggctcagact

SEQ ID NO: 71636 - DNA, 20 bp, Artificial Sequence
  chemically synthesized
attggctcagactcagaatg

SEQ ID NO: 71637 - DNA, 20 bp, Artificial Sequence
  chemically synthesized
ggctcagactcagaatgcag

SEQ ID NO: 71638 - DNA, 20 bp, Artificial Sequence
  chemically synthesized
gcagtagaacttgtgccctg

SEQ ID NO: 71639 - DNA, 20 bp, Artificial Sequence
  chemically synthesized
cttgtgccctgtagtgttca

SEQ ID NO: 71640 - DNA, 20 bp, Artificial Sequence
  chemically synthesized
tgccctgtagtgttcatgga

SEQ ID NO: 71641 - DNA, 20 bp, Artificial Sequence
  chemically synthesized
gccctgtagtgttcatggac

SEQ ID NO: 71642 - DNA, 20 bp, Artificial Sequence
  chemically synthesized
cctgtagtgttcatggacag

SEQ ID NO: 71643 - DNA, 20 bp, Artificial Sequence
  chemically synthesized
tagtgttcatggacaggagt

SEQ ID NO: 71644 - DNA, 20 bp, Artificial Sequence
  chemically synthesized
gtgttcatggacaggagtga

SEQ ID NO: 71645 - DNA, 20 bp, Artificial Sequence
  chemically synthesized
tgttcatggacaggagtgag

SEQ ID NO: 71646 - DNA, 20 bp, Artificial Sequence
  chemically synthesized
ttcatggacaggagtgagag

SEQ ID NO: 71647 - DNA, 20 bp, Artificial Sequence
  chemically synthesized
tcatggacaggagtgagagg

SEQ ID NO: 71648 - DNA, 20 bp, Artificial Sequence
  chemically synthesized
ggacaggagtgagaggagga

SEQ ID NO: 71649 - DNA, 20 bp, Artificial Sequence
  chemically synthesized
gacaggagtgagaggaggac

SEQ ID NO: 71650 - DNA, 20 bp, Artificial Sequence
  chemically synthesized
agtgagaggaggacaggact

SEQ ID NO: 71651 - DNA, 20 bp, Artificial Sequence
  chemically synthesized
gtgagaggaggacaggactg

SEQ ID NO: 71652 - DNA, 20 bp, Artificial Sequence
  chemically synthesized
tgagaggaggacaggactga

SEQ ID NO: 71653 - DNA, 20 bp, Artificial Sequence
  chemically synthesized
gagaggaggacaggactgag

SEQ ID NO: 71654 - DNA, 20 bp, Artificial Sequence
  chemically synthesized
aggacaggactgaggggatg

SEQ ID NO: 71655 - DNA, 20 bp, Artificial Sequence
  chemically synthesized
actgaggggatgtggctgtc

SEQ ID NO: 71656 - DNA, 20 bp, Artificial Sequence
  chemically synthesized
ctgaggggatgtggctgtca

SEQ ID NO: 71657 - DNA, 20 bp, Artificial Sequence
  chemically synthesized
tgtggctgtcaaggcctttc

SEQ ID NO: 71658 - DNA, 20 bp, Artificial Sequence
  chemically synthesized
gtggctgtcaaggcctttct

SEQ ID NO: 71659 - DNA, 20 bp, Artificial Sequence
  chemically synthesized
tggctgtcaaggcctttcta

SEQ ID NO: 71660 - DNA, 20 bp, Artificial Sequence
  chemically synthesized
ggctgtcaaggcctttctag

SEQ ID NO: 71661 - DNA, 20 bp, Artificial Sequence
  chemically synthesized
gggcgatgctgtctctccct

SEQ ID NO: 71662 - DNA, 20 bp, Artificial Sequence
  chemically synthesized
atgctgtctctccctcagca

SEQ ID NO: 71663 - DNA, 20 bp, Artificial Sequence
  chemically synthesized
tgctgtctctccctcagcat

SEQ ID NO: 71664 - DNA, 20 bp, Artificial Sequence
  chemically synthesized
gctgtctctccctcagcata

SEQ ID NO: 71665 - DNA, 20 bp, Artificial Sequence
  chemically synthesized
tgtctctccctcagcatagg

SEQ ID NO: 71666 - DNA, 20 bp, Artificial Sequence
  chemically synthesized
ctctccctcagcatagggag

SEQ ID NO: 71667 - DNA, 20 bp, Artificial Sequence
  chemically synthesized
tctccctcagcatagggagt

SEQ ID NO: 71668 - DNA, 20 bp, Artificial Sequence
  chemically synthesized
ggagtgggcccttccacctc

SEQ ID NO: 71669 - DNA, 20 bp, Artificial Sequence
  chemically synthesized
cacctctggcctctctcccc

SEQ ID NO: 71670 - DNA, 20 bp, Artificial Sequence
  chemically synthesized
acctctggcctctctccccc

SEQ ID NO: 71671 - DNA, 20 bp, Artificial Sequence
  chemically synthesized
cctctggcctctctccccca

SEQ ID NO: 71672 - DNA, 20 bp, Artificial Sequence
  chemically synthesized
ctctcccccagggctgtgtc

SEQ ID NO: 71673 - DNA, 20 bp, Artificial Sequence
  chemically synthesized
gctgtccctgataaaactgt

SEQ ID NO: 71674 - DNA, 20 bp, Artificial Sequence
  chemically synthesized
tccctgataaaactgtgaga

SEQ ID NO: 71675 - DNA, 20 bp, Artificial Sequence
  chemically synthesized
taaaactgtgagatggtgtg

SEQ ID NO: 71676 - DNA, 20 bp, Artificial Sequence
  chemically synthesized
tgtgagatggtgtgcagtgt

SEQ ID NO: 71677 - DNA, 20 bp, Artificial Sequence
  chemically synthesized
tgagatggtgtgcagtgtcg

SEQ ID NO: 71678 - DNA, 20 bp, Artificial Sequence
  chemically synthesized
ggtgtgcagtgtcggagcat

SEQ ID NO: 71679 - DNA, 20 bp, Artificial Sequence
  chemically synthesized
gtgtgcagtgtcggagcatg

SEQ ID NO: 71680 - DNA, 20 bp, Artificial Sequence
  chemically synthesized
tgtcggagcatgaggccact

SEQ ID NO: 71681 - DNA, 20 bp, Artificial Sequence
  chemically synthesized
agcatgaggccactaagtgc

SEQ ID NO: 71682 - DNA, 20 bp, Artificial Sequence
  chemically synthesized
catgaggccactaagtgcca

SEQ ID NO: 71683 - DNA, 20 bp, Artificial Sequence
  chemically synthesized
agtttccgcgaccatatgaa

SEQ ID NO: 71684 - DNA, 20 bp, Artificial Sequence
  chemically synthesized
aaaagcgtcattccatccga

SEQ ID NO: 71685 - DNA, 20 bp, Artificial Sequence
  chemically synthesized
gtcattccatccgatggtcc

SEQ ID NO: 71686 - DNA, 20 bp, Artificial Sequence
  chemically synthesized
gtcccagtgttgcttgtgtg

SEQ ID NO: 71687 - DNA, 20 bp, Artificial Sequence
  chemically synthesized
cagtgttgcttgtgtgaaga

SEQ ID NO: 71688 - DNA, 20 bp, Artificial Sequence
  chemically synthesized
gcctcctaccttgattgcat

SEQ ID NO: 71689 - DNA, 20 bp, Artificial Sequence
  chemically synthesized
cctcctaccttgattgcatc

SEQ ID NO: 71690 - DNA, 20 bp, Artificial Sequence
  chemically synthesized
ctcctaccttgattgcatca

SEQ ID NO: 71691 - DNA, 20 bp, Artificial Sequence
  chemically synthesized
gcaatggccctgatgcaatc

SEQ ID NO: 71692 - DNA, 20 bp, Artificial Sequence
  chemically synthesized
caatggccctgatgcaatca

SEQ ID NO: 71693 - DNA, 20 bp, Artificial Sequence
  chemically synthesized
tggccctgatgcaatcaagg

SEQ ID NO: 71694 - DNA, 20 bp, Artificial Sequence
  chemically synthesized
ggccctgatgcaatcaaggt

SEQ ID NO: 71695 - DNA, 20 bp, Artificial Sequence
  chemically synthesized
ccctgatgcaatcaaggtag

SEQ ID NO: 71696 - DNA, 20 bp, Artificial Sequence
  chemically synthesized
cctgatgcaatcaaggtagg

SEQ ID NO: 71697 - DNA, 20 bp, Artificial Sequence
  chemically synthesized
gtaggaggctttcttcacac

SEQ ID NO: 71698 - DNA, 20 bp, Artificial Sequence
  chemically synthesized
tttcttcacacaagcaacac

SEQ ID NO: 71699 - DNA, 20 bp, Artificial Sequence
  chemically synthesized
ttcttcacacaagcaacact

SEQ ID NO: 71700 - DNA, 20 bp, Artificial Sequence
  chemically synthesized
acaagcaacactgggaccat

SEQ ID NO: 71701 - DNA, 20 bp, Artificial Sequence
  chemically synthesized
gcaacactgggaccatcgga

SEQ ID NO: 71702 - DNA, 20 bp, Artificial Sequence
  chemically synthesized
atggaatgacgcttttcata

SEQ ID NO: 71703 - DNA, 20 bp, Artificial Sequence
  chemically synthesized
tgacgcttttcatatggtcg

SEQ ID NO: 71704 - DNA, 20 bp, Artificial Sequence
  chemically synthesized
tcatatggtcgcggaaactc

SEQ ID NO: 71705 - DNA, 20 bp, Artificial Sequence
  chemically synthesized
gtcgcggaaactctggcact

SEQ ID NO: 71706 - DNA, 20 bp, Artificial Sequence
  chemically synthesized
gcggaaactctggcacttag

SEQ ID NO: 71707 - DNA, 20 bp, Artificial Sequence
  chemically synthesized
cgacactgcacaccatctca

SEQ ID NO: 71708 - DNA, 20 bp, Artificial Sequence
  chemically synthesized
acaccatctcacagttttat

SEQ ID NO: 71709 - DNA, 20 bp, Artificial Sequence
  chemically synthesized
caccatctcacagttttatc

SEQ ID NO: 71710 - DNA, 20 bp, Artificial Sequence
  chemically synthesized
accatctcacagttttatca

SEQ ID NO: 71711 - DNA, 20 bp, Artificial Sequence
  chemically synthesized
tctcacagttttatcaggga

SEQ ID NO: 71712 - DNA, 20 bp, Artificial Sequence
  chemically synthesized
acagttttatcagggacagc

SEQ ID NO: 71713 - DNA, 20 bp, Artificial Sequence
  chemically synthesized
ttatcagggacagccagaca

SEQ ID NO: 71714 - DNA, 20 bp, Artificial Sequence
  chemically synthesized
gggacagccagacacagccc

SEQ ID NO: 71715 - DNA, 20 bp, Artificial Sequence
  chemically synthesized
ggacagccagacacagccct

SEQ ID NO: 71716 - DNA, 20 bp, Artificial Sequence
  chemically synthesized
gacagccagacacagccctg

SEQ ID NO: 71717 - DNA, 20 bp, Artificial Sequence
  chemically synthesized
acagccagacacagccctgg

SEQ ID NO: 71718 - DNA, 20 bp, Artificial Sequence
  chemically synthesized
agccagacacagccctgggg

SEQ ID NO: 71719 - DNA, 20 bp, Artificial Sequence
  chemically synthesized
ccagacacagccctggggga

SEQ ID NO: 71720 - DNA, 20 bp, Artificial Sequence
  chemically synthesized
agacacagccctgggggaga

SEQ ID NO: 71721 - DNA, 20 bp, Artificial Sequence
  chemically synthesized
gacacagccctgggggagag

SEQ ID NO: 71722 - DNA, 20 bp, Artificial Sequence
  chemically synthesized
cagccctgggggagagaggc

SEQ ID NO: 71723 - DNA, 20 bp, Artificial Sequence
  chemically synthesized
gccctgggggagagaggcca

SEQ ID NO: 71724 - DNA, 20 bp, Artificial Sequence
  chemically synthesized
ccctgggggagagaggccag

SEQ ID NO: 71725 - DNA, 20 bp, Artificial Sequence
  chemically synthesized
tgggggagagaggccagagg

SEQ ID NO: 71726 - DNA, 20 bp, Artificial Sequence
  chemically synthesized
gggagagaggccagaggtgg

SEQ ID NO: 71727 - DNA, 20 bp, Artificial Sequence
  chemically synthesized
ggagagaggccagaggtgga

SEQ ID NO: 71728 - DNA, 20 bp, Artificial Sequence
  chemically synthesized
gagagaggccagaggtggaa

SEQ ID NO: 71729 - DNA, 20 bp, Artificial Sequence
  chemically synthesized
aagggcccactccctatgct

SEQ ID NO: 71730 - DNA, 20 bp, Artificial Sequence
  chemically synthesized
agggcccactccctatgctg

SEQ ID NO: 71731 - DNA, 20 bp, Artificial Sequence
  chemically synthesized
gggcccactccctatgctga

SEQ ID NO: 71732 - DNA, 20 bp, Artificial Sequence
  chemically synthesized
gcccactccctatgctgagg

SEQ ID NO: 71733 - DNA, 20 bp, Artificial Sequence
  chemically synthesized
ccactccctatgctgaggga

SEQ ID NO: 71734 - DNA, 20 bp, Artificial Sequence
  chemically synthesized
tccctatgctgagggagaga

SEQ ID NO: 71735 - DNA, 20 bp, Artificial Sequence
  chemically synthesized
gggagagacagcatcgcccc

SEQ ID NO: 71736 - DNA, 20 bp, Artificial Sequence
  chemically synthesized
gagacagcatcgcccctaga

SEQ ID NO: 71737 - DNA, 20 bp, Artificial Sequence
  chemically synthesized
agacagcatcgcccctagaa

SEQ ID NO: 71738 - DNA, 20 bp, Artificial Sequence
  chemically synthesized
cgcccctagaaaggccttga

SEQ ID NO: 71739 - DNA, 20 bp, Artificial Sequence
  chemically synthesized
ccttgacagccacatcccct

SEQ ID NO: 71740 - DNA, 20 bp, Artificial Sequence
  chemically synthesized
actcctgtccatgaacacta

SEQ ID NO: 71741 - DNA, 20 bp, Artificial Sequence
  chemically synthesized
ctcctgtccatgaacactac

SEQ ID NO: 71742 - DNA, 20 bp, Artificial Sequence
  chemically synthesized
tcctgtccatgaacactaca

SEQ ID NO: 71743 - DNA, 20 bp, Artificial Sequence
  chemically synthesized
ccatgaacactacagggcac

SEQ ID NO: 71744 - DNA, 20 bp, Artificial Sequence
  chemically synthesized
cacaagttctactgcattct

SEQ ID NO: 71745 - DNA, 20 bp, Artificial Sequence
  chemically synthesized
ttctactgcattctgagtct

SEQ ID NO: 71746 - DNA, 20 bp, Artificial Sequence
  chemically synthesized
gcattctgagtctgagccaa

SEQ ID NO: 71747 - DNA, 20 bp, Artificial Sequence
  chemically synthesized
ttctgagtctgagccaatag

SEQ ID NO: 71748 - DNA, 20 bp, Artificial Sequence
  chemically synthesized
tctgagtctgagccaataga

SEQ ID NO: 71749 - DNA, 20 bp, Artificial Sequence
  chemically synthesized
ccaatagaaggttgccctaa

SEQ ID NO: 71750 - DNA, 20 bp, Artificial Sequence
  chemically synthesized
aggttgccctaatggcctcc

SEQ ID NO: 71751 - DNA, 20 bp, Artificial Sequence
  chemically synthesized
tcctactgaccaccctctgc

SEQ ID NO: 71752 - DNA, 20 bp, Artificial Sequence
  chemically synthesized
actgaccaccctctgctggc

SEQ ID NO: 71753 - DNA, 20 bp, Artificial Sequence
  chemically synthesized
tgaccaccctctgctggcca

SEQ ID NO: 71754 - DNA, 20 bp, Artificial Sequence
  chemically synthesized
gaccaccctctgctggccag

SEQ ID NO: 71755 - DNA, 20 bp, Artificial Sequence
  chemically synthesized
accaccctctgctggccaga

SEQ ID NO: 71756 - DNA, 20 bp, Artificial Sequence
  chemically synthesized
ccaccctctgctggccagag

SEQ ID NO: 71757 - DNA, 20 bp, Artificial Sequence
  chemically synthesized
ctctgctggccagaggggtg

SEQ ID NO: 71758 - DNA, 20 bp, Artificial Sequence
  chemically synthesized
tctgctggccagaggggtgc

SEQ ID NO: 71759 - DNA, 20 bp, Artificial Sequence
  chemically synthesized
tggccagaggggtgcaggca

SEQ ID NO: 71760 - DNA, 20 bp, Artificial Sequence
  chemically synthesized
caggcatggccatcacctcc

SEQ ID NO: 71761 - DNA, 20 bp, Artificial Sequence
  chemically synthesized
catggccatcacctcccagc

SEQ ID NO: 71762 - DNA, 20 bp, Artificial Sequence
  chemically synthesized
tggccatcacctcccagctg

SEQ ID NO: 71763 - DNA, 20 bp, Artificial Sequence
  chemically synthesized
gtctcctcccatcactgtcc

SEQ ID NO: 71764 - DNA, 20 bp, Artificial Sequence
  chemically synthesized
cccatcactgtcctggcccc

SEQ ID NO: 71765 - DNA, 20 bp, Artificial Sequence
  chemically synthesized
tcctggcccctggcccccca

SEQ ID NO: 71766 - DNA, 20 bp, Artificial Sequence
  chemically synthesized
cctggccccccatggaacat

SEQ ID NO: 71767 - DNA, 20 bp, Artificial Sequence
  chemically synthesized
cccccatggaacataagcct

SEQ ID NO: 71768 - DNA, 20 bp, Artificial Sequence
  chemically synthesized
aacataagcctcagtatgca

SEQ ID NO: 71769 - DNA, 20 bp, Artificial Sequence
  chemically synthesized
acataagcctcagtatgcac

SEQ ID NO: 71770 - DNA, 20 bp, Artificial Sequence
  chemically synthesized
cataagcctcagtatgcaca

SEQ ID NO: 71771 - DNA, 20 bp, Artificial Sequence
  chemically synthesized
cagtatgcacagggcgtttt

SEQ ID NO: 71772 - DNA, 20 bp, Artificial Sequence
  chemically synthesized
tttcagctaccccaacacat

SEQ ID NO: 71773 - DNA, 20 bp, Artificial Sequence
  chemically synthesized
ttggcttgctacctcaacta

SEQ ID NO: 71774 - DNA, 20 bp, Artificial Sequence
  chemically synthesized
ctacctcaactatggaaaac

SEQ ID NO: 71775 - DNA, 20 bp, Artificial Sequence
  chemically synthesized
cctcaactatggaaaaccag

SEQ ID NO: 71776 - DNA, 20 bp, Artificial Sequence
  chemically synthesized
ctcaactatggaaaaccagc

SEQ ID NO: 71777 - DNA, 20 bp, Artificial Sequence
  chemically synthesized
tcaactatggaaaaccagcg

SEQ ID NO: 71778 - DNA, 20 bp, Artificial Sequence
  chemically synthesized
caactatggaaaaccagcgg

SEQ ID NO: 71779 - DNA, 20 bp, Artificial Sequence
  chemically synthesized
actatggaaaaccagcgggg

SEQ ID NO: 71780 - DNA, 20 bp, Artificial Sequence
  chemically synthesized
ctatggaaaaccagcggggg

SEQ ID NO: 71781 - DNA, 20 bp, Artificial Sequence
  chemically synthesized
ggaggaattgccatcttttt

SEQ ID NO: 71782 - DNA, 20 bp, Artificial Sequence
  chemically synthesized
ggaattgccatctttttgag

SEQ ID NO: 71783 - DNA, 20 bp, Artificial Sequence
  chemically synthesized
aattgccatctttttgagaa

SEQ ID NO: 71784 - DNA, 20 bp, Artificial Sequence
  chemically synthesized
attgccatctttttgagaag

SEQ ID NO: 71785 - DNA, 20 bp, Artificial Sequence
  chemically synthesized
ttgccatctttttgagaaga

SEQ ID NO: 71786 - DNA, 20 bp, Artificial Sequence
  chemically synthesized
gccatctttttgagaagagg

SEQ ID NO: 71787 - DNA, 20 bp, Artificial Sequence
  chemically synthesized
tctttttgagaagagggagt

SEQ ID NO: 71788 - DNA, 20 bp, Artificial Sequence
  chemically synthesized
tgagaagagggagtgagact

SEQ ID NO: 71789 - DNA, 20 bp, Artificial Sequence
  chemically synthesized
agaagagggagtgagactca

SEQ ID NO: 71790 - DNA, 20 bp, Artificial Sequence
  chemically synthesized
cctttttttttttttaaccc

SEQ ID NO: 71791 - DNA, 20 bp, Artificial Sequence
  chemically synthesized
ctttttttttttttaaccca

SEQ ID NO: 71792 - DNA, 20 bp, Artificial Sequence
  chemically synthesized
aaggtcaccctgcttgtcgt

SEQ ID NO: 71793 - DNA, 20 bp, Artificial Sequence
  chemically synthesized
caccctgcttgtcgttggcc

SEQ ID NO: 71794 - DNA, 20 bp, Artificial Sequence
  chemically synthesized
ctgcttgtcgttggccaagc

SEQ ID NO: 71795 - DNA, 20 bp, Artificial Sequence
  chemically synthesized
tgcttgtcgttggccaagcc

SEQ ID NO: 71796 - DNA, 20 bp, Artificial Sequence
  chemically synthesized
gtcgttggccaagccaggcc

SEQ ID NO: 71797 - DNA, 20 bp, Artificial Sequence
  chemically synthesized
gccaagccaggcctagaatc

SEQ ID NO: 71798 - DNA, 20 bp, Artificial Sequence
  chemically synthesized
ccaagccaggcctagaatct

SEQ ID NO: 71799 - DNA, 20 bp, Artificial Sequence
  chemically synthesized
aggcctagaatctgggtctc

SEQ ID NO: 71800 - DNA, 20 bp, Artificial Sequence
  chemically synthesized
gaatctgggtctccagactc

SEQ ID NO: 71801 - DNA, 20 bp, Artificial Sequence
  chemically synthesized
aatctgggtctccagactct

SEQ ID NO: 71802 - DNA, 20 bp, Artificial Sequence
  chemically synthesized
cagactctgggtctgctact

SEQ ID NO: 71803 - DNA, 20 bp, Artificial Sequence
  chemically synthesized
agactctgggtctgctactc

SEQ ID NO: 71804 - DNA, 20 bp, Artificial Sequence
  chemically synthesized
gactctgggtctgctactca

SEQ ID NO: 71805 - DNA, 20 bp, Artificial Sequence
  chemically synthesized
gtctgctactcagggcacaa

SEQ ID NO: 71806 - DNA, 20 bp, Artificial Sequence
  chemically synthesized
tgctactcagggcacaaaag

SEQ ID NO: 71807 - DNA, 20 bp, Artificial Sequence
  chemically synthesized
acaaaagaagaaaacattct

SEQ ID NO: 71808 - DNA, 20 bp, Artificial Sequence
  chemically synthesized
ttctgagttacaccccttct

SEQ ID NO: 71809 - DNA, 20 bp, Artificial Sequence
  chemically synthesized
gagttacaccccttcttggc

SEQ ID NO: 71810 - DNA, 20 bp, Artificial Sequence
  chemically synthesized
ttacaccccttcttggccag

SEQ ID NO: 71811 - DNA, 20 bp, Artificial Sequence
  chemically synthesized
ccccttcttggccagtagtt

SEQ ID NO: 71812 - DNA, 20 bp, Artificial Sequence
  chemically synthesized
cccttcttggccagtagttg

SEQ ID NO: 71813 - DNA, 20 bp, Artificial Sequence
  chemically synthesized
ccttcttggccagtagttga

SEQ ID NO: 71814 - DNA, 20 bp, Artificial Sequence
  chemically synthesized
gttgagggtaaattaacgaa

SEQ ID NO: 71815 - DNA, 20 bp, Artificial Sequence
  chemically synthesized
cttgtctgttgctctctgtt

SEQ ID NO: 71816 - DNA, 20 bp, Artificial Sequence
  chemically synthesized
ttgtctgttgctctctgttt

SEQ ID NO: 71817 - DNA, 20 bp, Artificial Sequence
  chemically synthesized
tctgttgctctctgtttagg

SEQ ID NO: 71818 - DNA, 20 bp, Artificial Sequence
  chemically synthesized
taaaaactccacaaattcaa

SEQ ID NO: 71819 - DNA, 20 bp, Artificial Sequence
  chemically synthesized
tccattttcaccacactttt

SEQ ID NO: 71820 - DNA, 20 bp, Artificial Sequence
  chemically synthesized
ttggctgccattcacaaaaa

SEQ ID NO: 71821 - DNA, 20 bp, Artificial Sequence
  chemically synthesized
gccattcacaaaaaaagctg

SEQ ID NO: 71822 - DNA, 20 bp, Artificial Sequence
  chemically synthesized
ttcacaaaaaaagctgaagc

SEQ ID NO: 71823 - DNA, 20 bp, Artificial Sequence
  chemically synthesized
aaaaaagctgaagccagcca

SEQ ID NO: 71824 - DNA, 20 bp, Artificial Sequence
  chemically synthesized
aaaaagctgaagccagccat

SEQ ID NO: 71825 - DNA, 20 bp, Artificial Sequence
  chemically synthesized
ggtaactattaaaatccatg

SEQ ID NO: 71826 - DNA, 20 bp, Artificial Sequence
  chemically synthesized
tattaaaatccatgtggttg

SEQ ID NO: 71827 - DNA, 20 bp, Artificial Sequence
  chemically synthesized
ttaaaatccatgtggttgca

SEQ ID NO: 71828 - DNA, 20 bp, Artificial Sequence
  chemically synthesized
aatccatgtggttgcagaga

SEQ ID NO: 71829 - DNA, 20 bp, Artificial Sequence
  chemically synthesized
agacagcatccctatcacat

SEQ ID NO: 71830 - DNA, 20 bp, Artificial Sequence
  chemically synthesized
tgagcttttgccctgtcccc

SEQ ID NO: 71831 - DNA, 20 bp, Artificial Sequence
  chemically synthesized
gagcttttgccctgtcccca

SEQ ID NO: 71832 - DNA, 20 bp, Artificial Sequence
  chemically synthesized
tctgtcatctccactccttg

SEQ ID NO: 71833 - DNA, 20 bp, Artificial Sequence
  chemically synthesized
ctgtcatctccactccttgt

SEQ ID NO: 71834 - DNA, 20 bp, Artificial Sequence
  chemically synthesized
ccactccttgtgggccacca

SEQ ID NO: 71835 - DNA, 20 bp, Artificial Sequence
  chemically synthesized
tccttgtgggccaccacagc

SEQ ID NO: 71836 - DNA, 20 bp, Artificial Sequence
  chemically synthesized
ccttgtgggccaccacagca

SEQ ID NO: 71837 - DNA, 20 bp, Artificial Sequence
  chemically synthesized
ccacagcaaggctgactcac

SEQ ID NO: 71838 - DNA, 20 bp, Artificial Sequence
  chemically synthesized
aggctgactcactggctctg

SEQ ID NO: 71839 - DNA, 20 bp, Artificial Sequence
  chemically synthesized
ctgactcactggctctgaag

SEQ ID NO: 71840 - DNA, 20 bp, Artificial Sequence
  chemically synthesized
ggctctgaagaagatccaca

SEQ ID NO: 71841 - DNA, 20 bp, Artificial Sequence
  chemically synthesized
aagaagatccacaaagcctg

SEQ ID NO: 71842 - DNA, 20 bp, Artificial Sequence
  chemically synthesized
gaagatccacaaagcctgtg

SEQ ID NO: 71843 - DNA, 20 bp, Artificial Sequence
  chemically synthesized
agatccacaaagcctgtgga

SEQ ID NO: 71844 - DNA, 20 bp, Artificial Sequence
  chemically synthesized
gatccacaaagcctgtggag

SEQ ID NO: 71845 - DNA, 20 bp, Artificial Sequence
  chemically synthesized
tccacaaagcctgtggagag

SEQ ID NO: 71846 - DNA, 20 bp, Artificial Sequence
  chemically synthesized
ccacaaagcctgtggagagg

SEQ ID NO: 71847 - DNA, 20 bp, Artificial Sequence
  chemically synthesized
gcctgtggagaggaggccca

SEQ ID NO: 71848 - DNA, 20 bp, Artificial Sequence
  chemically synthesized
agaggaggcccacagctctc

SEQ ID NO: 71849 - DNA, 20 bp, Artificial Sequence
  chemically synthesized
gaggaggcccacagctctcc

SEQ ID NO: 71850 - DNA, 20 bp, Artificial Sequence
  chemically synthesized
cacagctctccaggatgcat

SEQ ID NO: 71851 - DNA, 20 bp, Artificial Sequence
  chemically synthesized
acagctctccaggatgcatg

SEQ ID NO: 71852 - DNA, 20 bp, Artificial Sequence
  chemically synthesized
agctctccaggatgcatgag

SEQ ID NO: 71853 - DNA, 20 bp, Artificial Sequence
  chemically synthesized
gctctccaggatgcatgagg

SEQ ID NO: 71854 - DNA, 20 bp, Artificial Sequence
  chemically synthesized
ctctccaggatgcatgagga

SEQ ID NO: 71855 - DNA, 20 bp, Artificial Sequence
  chemically synthesized
tctccaggatgcatgaggag

SEQ ID NO: 71856 - DNA, 20 bp, Artificial Sequence
  chemically synthesized
gatgcatgaggaggggccac

SEQ ID NO: 71857 - DNA, 20 bp, Artificial Sequence
  chemically synthesized
atgcatgaggaggggccacc

SEQ ID NO: 71858 - DNA, 20 bp, Artificial Sequence
  chemically synthesized
tgcatgaggaggggccacca

SEQ ID NO: 71859 - DNA, 20 bp, Artificial Sequence
  chemically synthesized
tgaggaggggccaccaggga

SEQ ID NO: 71860 - DNA, 20 bp, Artificial Sequence
  chemically synthesized
gccaccagggatggccaccc

SEQ ID NO: 71861 - DNA, 20 bp, Artificial Sequence
  chemically synthesized
gcgacccccattttccctct

SEQ ID NO: 71862 - DNA, 20 bp, Artificial Sequence
  chemically synthesized
ccattttccctcttggccca

SEQ ID NO: 71863 - DNA, 20 bp, Artificial Sequence
  chemically synthesized
cattttccctcttggcccat

SEQ ID NO: 71864 - DNA, 20 bp, Artificial Sequence
  chemically synthesized
tcttggcccatgggaaatcc

SEQ ID NO: 71865 - DNA, 20 bp, Artificial Sequence
  chemically synthesized
cttggcccatgggaaatcct

SEQ ID NO: 71866 - DNA, 20 bp, Artificial Sequence
  chemically synthesized
tggcccatgggaaatcctag

SEQ ID NO: 71867 - DNA, 20 bp, Artificial Sequence
  chemically synthesized
ggcccatgggaaatcctagg

SEQ ID NO: 71868 - DNA, 20 bp, Artificial Sequence
  chemically synthesized
gaaatcctaggaggcaacat

SEQ ID NO: 71869 - DNA, 20 bp, Artificial Sequence
  chemically synthesized
taggaggcaacataagcctg

SEQ ID NO: 71870 - DNA, 20 bp, Artificial Sequence
  chemically synthesized
gaggcaacataagcctgtgg

SEQ ID NO: 71871 - DNA, 20 bp, Artificial Sequence
  chemically synthesized
cctgtggcagcccctccaca

SEQ ID NO: 71872 - DNA, 20 bp, Artificial Sequence
  chemically synthesized
cctccacaaagccctgcctc

SEQ ID NO: 71873 - DNA, 20 bp, Artificial Sequence
  chemically synthesized
tccacaaagccctgcctcca

SEQ ID NO: 71874 - DNA, 20 bp, Artificial Sequence
  chemically synthesized
ccctgcctccagagttccca

SEQ ID NO: 71875 - DNA, 20 bp, Artificial Sequence
  chemically synthesized
cctgcctccagagttcccat

SEQ ID NO: 71876 - DNA, 20 bp, Artificial Sequence
  chemically synthesized
cctccagagttcccataggc

SEQ ID NO: 71877 - DNA, 20 bp, Artificial Sequence
  chemically synthesized
cataggcgagaatgtgtcct

SEQ ID NO: 71878 - DNA, 20 bp, Artificial Sequence
  chemically synthesized
aggcgagaatgtgtcctcag

SEQ ID NO: 71879 - DNA, 20 bp, Artificial Sequence
  chemically synthesized
gcgagaatgtgtcctcagtg

SEQ ID NO: 71880 - DNA, 20 bp, Artificial Sequence
  chemically synthesized
cagtggagcattaccttgca

SEQ ID NO: 71881 - DNA, 20 bp, Artificial Sequence
  chemically synthesized
attaccttgcacagcctgtg

SEQ ID NO: 71882 - DNA, 20 bp, Artificial Sequence
  chemically synthesized
agcctgtgaagtgctctgtg

SEQ ID NO: 71883 - DNA, 20 bp, Artificial Sequence
  chemically synthesized
gcctgtgaagtgctctgtgc

SEQ ID NO: 71884 - DNA, 20 bp, Artificial Sequence
  chemically synthesized
cctgtgaagtgctctgtgcg

SEQ ID NO: 71885 - DNA, 20 bp, Artificial Sequence
  chemically synthesized
aagtgctctgtgcggggata

SEQ ID NO: 71886 - DNA, 20 bp, Artificial Sequence
  chemically synthesized
agtgctctgtgcggggataa

SEQ ID NO: 71887 - DNA, 20 bp, Artificial Sequence
  chemically synthesized
ctctgtgcggggataaaggc

SEQ ID NO: 71888 - DNA, 20 bp, Artificial Sequence
  chemically synthesized
ggggataaaggcaagtaacg

SEQ ID NO: 71889 - DNA, 20 bp, Artificial Sequence
  chemically synthesized
gggataaaggcaagtaacgt

SEQ ID NO: 71890 - DNA, 20 bp, Artificial Sequence
  chemically synthesized
ggataaaggcaagtaacgtg

SEQ ID NO: 71891 - DNA, 20 bp, Artificial Sequence
  chemically synthesized
gtaacgtggggtcctctctc

SEQ ID NO: 71892 - DNA, 20 bp, Artificial Sequence
  chemically synthesized
taacgtggggtcctctctca

SEQ ID NO: 71893 - DNA, 20 bp, Artificial Sequence
  chemically synthesized
gtcctctctcaaggaattgc

SEQ ID NO: 71894 - DNA, 20 bp, Artificial Sequence
  chemically synthesized
ctcaaggaattgctagctta

SEQ ID NO: 71895 - DNA, 20 bp, Artificial Sequence
  chemically synthesized
tcaaggaattgctagcttat

SEQ ID NO: 71896 - DNA, 20 bp, Artificial Sequence
  chemically synthesized
caaggaattgctagcttatg

SEQ ID NO: 71897 - DNA, 20 bp, Artificial Sequence
  chemically synthesized
aggaattgctagcttatggg

SEQ ID NO: 71898 - DNA, 20 bp, Artificial Sequence
  chemically synthesized
gaattgctagcttatgggga

SEQ ID NO: 71899 - DNA, 20 bp, Artificial Sequence
  chemically synthesized
tggggagagaaaactaaacg

SEQ ID NO: 71900 - DNA, 20 bp, Artificial Sequence
  chemically synthesized
ggagagaaaactaaacgtgg

SEQ ID NO: 71901 - DNA, 20 bp, Artificial Sequence
  chemically synthesized
actaaacgtggaagccccaa

SEQ ID NO: 71902 - DNA, 20 bp, Artificial Sequence
  chemically synthesized
tgtgacaaatgccccatgaa

SEQ ID NO: 71903 - DNA, 20 bp, Artificial Sequence
  chemically synthesized
gacaaatgccccatgaatgg

SEQ ID NO: 71904 - DNA, 20 bp, Artificial Sequence
  chemically synthesized
acaaatgccccatgaatggc

SEQ ID NO: 71905 - DNA, 20 bp, Artificial Sequence
  chemically synthesized
aatgccccatgaatggcagg

SEQ ID NO: 71906 - DNA, 20 bp, Artificial Sequence
  chemically synthesized
gccccatgaatggcaggcag

SEQ ID NO: 71907 - DNA, 20 bp, Artificial Sequence
  chemically synthesized
catgaatggcaggcagaagt

SEQ ID NO: 71908 - DNA, 20 bp, Artificial Sequence
  chemically synthesized
tgaatggcaggcagaagtta

SEQ ID NO: 71909 - DNA, 20 bp, Artificial Sequence
  chemically synthesized
caggcagaagttagagtatg

SEQ ID NO: 71910 - DNA, 20 bp, Artificial Sequence
  chemically synthesized
aggcagaagttagagtatga

SEQ ID NO: 71911 - DNA, 20 bp, Artificial Sequence
  chemically synthesized
ggcagaagttagagtatgaa

SEQ ID NO: 71912 - DNA, 20 bp, Artificial Sequence
  chemically synthesized
gcagaagttagagtatgaag

SEQ ID NO: 71913 - DNA, 20 bp, Artificial Sequence
  chemically synthesized
cagaagttagagtatgaagg

SEQ ID NO: 71914 - DNA, 20 bp, Artificial Sequence
  chemically synthesized
gtatgaagggggccccacct

SEQ ID NO: 71915 - DNA, 20 bp, Artificial Sequence
  chemically synthesized
tatgaagggggccccacctc

SEQ ID NO: 71916 - DNA, 20 bp, Artificial Sequence
  chemically synthesized
tgaagggggccccacctcag

SEQ ID NO: 71917 - DNA, 20 bp, Artificial Sequence
  chemically synthesized
gaagggggccccacctcagg

SEQ ID NO: 71918 - DNA, 20 bp, Artificial Sequence
  chemically synthesized
ggggccccacctcaggaggt

SEQ ID NO: 71919 - DNA, 20 bp, Artificial Sequence
  chemically synthesized
gggccccacctcaggaggtc

SEQ ID NO: 71920 - DNA, 20 bp, Artificial Sequence
  chemically synthesized
ggccccacctcaggaggtcg

SEQ ID NO: 71921 - DNA, 20 bp, Artificial Sequence
  chemically synthesized
ccccacctcaggaggtcggg

SEQ ID NO: 71922 - DNA, 20 bp, Artificial Sequence
  chemically synthesized
cctcaggaggtcggggagtg

SEQ ID NO: 71923 - DNA, 20 bp, Artificial Sequence
  chemically synthesized
gaggtcggggagtgtggcgt

SEQ ID NO: 71924 - DNA, 20 bp, Artificial Sequence
  chemically synthesized
tggcgtcagccactgcccca

SEQ ID NO: 71925 - DNA, 20 bp, Artificial Sequence
  chemically synthesized
cgtcagccactgccccatag

SEQ ID NO: 71926 - DNA, 20 bp, Artificial Sequence
  chemically synthesized
gtcagccactgccccatagc

SEQ ID NO: 71927 - DNA, 20 bp, Artificial Sequence
  chemically synthesized
atgtgtgcaacatctgccac

SEQ ID NO: 71928 - DNA, 20 bp, Artificial Sequence
  chemically synthesized
caacatctgccactggtact

SEQ ID NO: 71929 - DNA, 20 bp, Artificial Sequence
  chemically synthesized
tgaccctcatttgaccctcc

SEQ ID NO: 71930 - DNA, 20 bp, Artificial Sequence
  chemically synthesized
gaccctcatttgaccctccc

SEQ ID NO: 71931 - DNA, 20 bp, Artificial Sequence
  chemically synthesized
ctcatttgaccctcccaggc

SEQ ID NO: 71932 - DNA, 20 bp, Artificial Sequence
  chemically synthesized
tgctgtgatgaccccctccc

SEQ ID NO: 71933 - DNA, 20 bp, Artificial Sequence
  chemically synthesized
gtgatgaccccctccctggt

SEQ ID NO: 71934 - DNA, 20 bp, Artificial Sequence
  chemically synthesized
tgatgaccccctccctggtg

SEQ ID NO: 71935 - DNA, 20 bp, Artificial Sequence
  chemically synthesized
atgaccccctccctggtgag

SEQ ID NO: 71936 - DNA, 20 bp, Artificial Sequence
  chemically synthesized
ccccctccctggtgaggagc

SEQ ID NO: 71937 - DNA, 20 bp, Artificial Sequence
  chemically synthesized
ctccctggtgaggagccggc

SEQ ID NO: 71938 - DNA, 20 bp, Artificial Sequence
  chemically synthesized
tccctggtgaggagccggcc

SEQ ID NO: 71939 - DNA, 20 bp, Artificial Sequence
  chemically synthesized
gtgaggagccggccaggact

SEQ ID NO: 71940 - DNA, 20 bp, Artificial Sequence
  chemically synthesized
gccggccaggacttggatcc

SEQ ID NO: 71941 - DNA, 20 bp, Artificial Sequence
  chemically synthesized
ggccaggacttggatccaag

SEQ ID NO: 71942 - DNA, 20 bp, Artificial Sequence
  chemically synthesized
ggacttggatccaagaagtc

SEQ ID NO: 71943 - DNA, 20 bp, Artificial Sequence
  chemically synthesized
cccatgctctgaccgctcga

SEQ ID NO: 71944 - DNA, 20 bp, Artificial Sequence
  chemically synthesized
gctcgatggcaccgcttcct

SEQ ID NO: 71945 - DNA, 20 bp, Artificial Sequence
  chemically synthesized
cgatggcaccgcttccttgg

SEQ ID NO: 71946 - DNA, 20 bp, Artificial Sequence
  chemically synthesized
gatggcaccgcttccttggc

SEQ ID NO: 71947 - DNA, 20 bp, Artificial Sequence
  chemically synthesized
cttccttggcaggacatcta

SEQ ID NO: 71948 - DNA, 20 bp, Artificial Sequence
  chemically synthesized
ggcaggacatctacagctcc

SEQ ID NO: 71949 - DNA, 20 bp, Artificial Sequence
  chemically synthesized
gcaggacatctacagctccc

SEQ ID NO: 71950 - DNA, 20 bp, Artificial Sequence
  chemically synthesized
caggacatctacagctccca

SEQ ID NO: 71951 - DNA, 20 bp, Artificial Sequence
  chemically synthesized
tctacagctcccagggcacc

SEQ ID NO: 71952 - DNA, 20 bp, Artificial Sequence
  chemically synthesized
ctacagctcccagggcaccc

SEQ ID NO: 71953 - DNA, 20 bp, Artificial Sequence
  chemically synthesized
tacagctcccagggcaccca

SEQ ID NO: 71954 - DNA, 20 bp, Artificial Sequence
  chemically synthesized
acagctcccagggcacccag

SEQ ID NO: 71955 - DNA, 20 bp, Artificial Sequence
  chemically synthesized
ccagggcacccaggggacat

SEQ ID NO: 71956 - DNA, 20 bp, Artificial Sequence
  chemically synthesized
caggggacatcagcctctga

SEQ ID NO: 71957 - DNA, 20 bp, Artificial Sequence
  chemically synthesized
aggggacatcagcctctgaa

SEQ ID NO: 71958 - DNA, 20 bp, Artificial Sequence
  chemically synthesized
ggggacatcagcctctgaaa

SEQ ID NO: 71959 - DNA, 20 bp, Artificial Sequence
  chemically synthesized
gggacatcagcctctgaaag

SEQ ID NO: 71960 - DNA, 20 bp, Artificial Sequence
  chemically synthesized
atcagcctctgaaaggggaa

SEQ ID NO: 71961 - DNA, 20 bp, Artificial Sequence
  chemically synthesized
gcctctgaaaggggaatggt

SEQ ID NO: 71962 - DNA, 20 bp, Artificial Sequence
  chemically synthesized
gaaaggggaatggtcagacc

SEQ ID NO: 71963 - DNA, 20 bp, Artificial Sequence
  chemically synthesized
aaaggggaatggtcagaccc

SEQ ID NO: 71964 - DNA, 20 bp, Artificial Sequence
  chemically synthesized
aggggaatggtcagacccgg

SEQ ID NO: 71965 - DNA, 20 bp, Artificial Sequence
  chemically synthesized
ggggaatggtcagacccggg

SEQ ID NO: 71966 - DNA, 20 bp, Artificial Sequence
  chemically synthesized
gaggccttgaatgccatgct

SEQ ID NO: 71967 - DNA, 20 bp, Artificial Sequence
  chemically synthesized
aggccttgaatgccatgcta

SEQ ID NO: 71968 - DNA, 20 bp, Artificial Sequence
  chemically synthesized
gccttgaatgccatgctaag

SEQ ID NO: 71969 - DNA, 20 bp, Artificial Sequence
  chemically synthesized
gaatgccatgctaaggagtt

SEQ ID NO: 71970 - DNA, 20 bp, Artificial Sequence
  chemically synthesized
ctaaggagttcggacttgac

SEQ ID NO: 71971 - DNA, 20 bp, Artificial Sequence
  chemically synthesized
aaggagttcggacttgacaa

SEQ ID NO: 71972 - DNA, 20 bp, Artificial Sequence
  chemically synthesized
aggagttcggacttgacaag

SEQ ID NO: 71973 - DNA, 20 bp, Artificial Sequence
  chemically synthesized
agttcggacttgacaagagg

SEQ ID NO: 71974 - DNA, 20 bp, Artificial Sequence
  chemically synthesized
tcggacttgacaagaggcag

SEQ ID NO: 71975 - DNA, 20 bp, Artificial Sequence
  chemically synthesized
cttgacaagaggcagcagca

SEQ ID NO: 71976 - DNA, 20 bp, Artificial Sequence
  chemically synthesized
ttgacaagaggcagcagcaa

SEQ ID NO: 71977 - DNA, 20 bp, Artificial Sequence
  chemically synthesized
tgacaagaggcagcagcaaa

SEQ ID NO: 71978 - DNA, 20 bp, Artificial Sequence
  chemically synthesized
agcaaagggttttgataacc

SEQ ID NO: 71979 - DNA, 20 bp, Artificial Sequence
  chemically synthesized
aagggttttgataacctggt

SEQ ID NO: 71980 - DNA, 20 bp, Artificial Sequence
  chemically synthesized
ttattgtatttcactgctgc

SEQ ID NO: 71981 - DNA, 20 bp, Artificial Sequence
  chemically synthesized
ttcactgctgcaagatttac

SEQ ID NO: 71982 - DNA, 20 bp, Artificial Sequence
  chemically synthesized
gctgcaagatttactggaca

SEQ ID NO: 71983 - DNA, 20 bp, Artificial Sequence
  chemically synthesized
tgcaagatttactggacaaa

SEQ ID NO: 71984 - DNA, 20 bp, Artificial Sequence
  chemically synthesized
gcaagatttactggacaaag

SEQ ID NO: 71985 - DNA, 20 bp, Artificial Sequence
  chemically synthesized
aagatttactggacaaagag

SEQ ID NO: 71986 - DNA, 20 bp, Artificial Sequence
  chemically synthesized
agatttactggacaaagagg

SEQ ID NO: 71987 - DNA, 20 bp, Artificial Sequence
  chemically synthesized
atttactggacaaagaggag

SEQ ID NO: 71988 - DNA, 20 bp, Artificial Sequence
  chemically synthesized
tttactggacaaagaggagg

SEQ ID NO: 71989 - DNA, 20 bp, Artificial Sequence
  chemically synthesized
ttactggacaaagaggagga

SEQ ID NO: 71990 - DNA, 20 bp, Artificial Sequence
  chemically synthesized
tactggacaaagaggaggag

SEQ ID NO: 71991 - DNA, 20 bp, Artificial Sequence
  chemically synthesized
actggacaaagaggaggagg

SEQ ID NO: 71992 - DNA, 20 bp, Artificial Sequence
  chemically synthesized
tggacaaagaggaggagggg

SEQ ID NO: 71993 - DNA, 20 bp, Artificial Sequence
  chemically synthesized
acaaagaggaggagggggag

SEQ ID NO: 71994 - DNA, 20 bp, Artificial Sequence
  chemically synthesized
agaggaggagggggagaaga

SEQ ID NO: 71995 - DNA, 20 bp, Artificial Sequence
  chemically synthesized
gaggagggggagaagacagt

SEQ ID NO: 71996 - DNA, 20 bp, Artificial Sequence
  chemically synthesized
gggggagaagacagtgagtg

SEQ ID NO: 71997 - DNA, 20 bp, Artificial Sequence
  chemically synthesized
gaagacagtgagtgcagtga

SEQ ID NO: 71998 - DNA, 20 bp, Artificial Sequence
  chemically synthesized
aagacagtgagtgcagtgaa

SEQ ID NO: 71999 - DNA, 20 bp, Artificial Sequence
  chemically synthesized
tgagtgcagtgaaaggtgtc

SEQ ID NO: 72000 - DNA, 20 bp, Artificial Sequence
  chemically synthesized
gtgcagtgaaaggtgtctag

SEQ ID NO: 72001 - DNA, 20 bp, Artificial Sequence
  chemically synthesized
tgaaaggtgtctagaagccc

SEQ ID NO: 72002 - DNA, 20 bp, Artificial Sequence
  chemically synthesized
ggtgtctagaagcccaagca

SEQ ID NO: 72003 - DNA, 20 bp, Artificial Sequence
  chemically synthesized
gtgtctagaagcccaagcaa

SEQ ID NO: 72004 - DNA, 20 bp, Artificial Sequence
  chemically synthesized
ctagaagcccaagcaaaggc

SEQ ID NO: 72005 - DNA, 20 bp, Artificial Sequence
  chemically synthesized
tagaagcccaagcaaaggcc

SEQ ID NO: 72006 - DNA, 20 bp, Artificial Sequence
  chemically synthesized
agaagcccaagcaaaggcca

SEQ ID NO: 72007 - DNA, 20 bp, Artificial Sequence
  chemically synthesized
gaagcccaagcaaaggccag

SEQ ID NO: 72008 - DNA, 20 bp, Artificial Sequence
  chemically synthesized
gcccaagcaaaggccagggg

SEQ ID NO: 72009 - DNA, 20 bp, Artificial Sequence
  chemically synthesized
cccaagcaaaggccaggggt

SEQ ID NO: 72010 - DNA, 20 bp, Artificial Sequence
  chemically synthesized
ccaagcaaaggccaggggtg

SEQ ID NO: 72011 - DNA, 20 bp, Artificial Sequence
  chemically synthesized
caaaggccaggggtggggcg

SEQ ID NO: 72012 - DNA, 20 bp, Artificial Sequence
  chemically synthesized
aaggccaggggtggggcgta

SEQ ID NO: 72013 - DNA, 20 bp, Artificial Sequence
  chemically synthesized
ggccaggggtggggcgtaga

SEQ ID NO: 72014 - DNA, 20 bp, Artificial Sequence
  chemically synthesized
gccaggggtggggcgtagag

SEQ ID NO: 72015 - DNA, 20 bp, Artificial Sequence
  chemically synthesized
ggtggggcgtagagaggcaa

SEQ ID NO: 72016 - DNA, 20 bp, Artificial Sequence
  chemically synthesized
gggcgtagagaggcaatgga

SEQ ID NO: 72017 - DNA, 20 bp, Artificial Sequence
  chemically synthesized
ggcgtagagaggcaatggaa

SEQ ID NO: 72018 - DNA, 20 bp, Artificial Sequence
  chemically synthesized
agaggcaatggaaaggcacc

SEQ ID NO: 72019 - DNA, 20 bp, Artificial Sequence
  chemically synthesized
tggaaaggcacccagacacc

SEQ ID NO: 72020 - DNA, 20 bp, Artificial Sequence
  chemically synthesized
ggaaaggcacccagacaccc

SEQ ID NO: 72021 - DNA, 20 bp, Artificial Sequence
  chemically synthesized
cacccagacacccaggcttc

SEQ ID NO: 72022 - DNA, 20 bp, Artificial Sequence
  chemically synthesized
gacacccaggcttccagcct

SEQ ID NO: 72023 - DNA, 20 bp, Artificial Sequence
  chemically synthesized
ccaggcttccagcctgagcg

SEQ ID NO: 72024 - DNA, 20 bp, Artificial Sequence
  chemically synthesized
aggcttccagcctgagcgcg

SEQ ID NO: 72025 - DNA, 20 bp, Artificial Sequence
  chemically synthesized
gcctgagcgcggagtgcatg

SEQ ID NO: 72026 - DNA, 20 bp, Artificial Sequence
  chemically synthesized
cctgagcgcggagtgcatgc

SEQ ID NO: 72027 - DNA, 20 bp, Artificial Sequence
  chemically synthesized
cggagtgcatgcaggctgcg

SEQ ID NO: 72028 - DNA, 20 bp, Artificial Sequence
  chemically synthesized
agtgcatgcaggctgcgcgg

SEQ ID NO: 72029 - DNA, 20 bp, Artificial Sequence
  chemically synthesized
caggctgcgcggtggccgcc

SEQ ID NO: 72030 - DNA, 20 bp, Artificial Sequence
  chemically synthesized
aggctgcgcggtggccgccc

SEQ ID NO: 72031 - DNA, 20 bp, Artificial Sequence
  chemically synthesized
cgcggtggccgcccgggttg

SEQ ID NO: 72032 - DNA, 20 bp, Artificial Sequence
  chemically synthesized
gcggtggccgcccgggttgc

SEQ ID NO: 72033 - DNA, 20 bp, Artificial Sequence
  chemically synthesized
cggtggccgcccgggttgca

SEQ ID NO: 72034 - DNA, 20 bp, Artificial Sequence
  chemically synthesized
cccgggttgcagggaacgcg

SEQ ID NO: 72035 - DNA, 20 bp, Artificial Sequence
  chemically synthesized
ccgggttgcagggaacgcgc

SEQ ID NO: 72036 - DNA, 20 bp, Artificial Sequence
  chemically synthesized
gttgcagggaacgcgcgggc

SEQ ID NO: 72037 - DNA, 20 bp, Artificial Sequence
  chemically synthesized
cgcgcgggccagcgactctg

SEQ ID NO: 72038 - DNA, 20 bp, Artificial Sequence
  chemically synthesized
accccgtgcccgcactcacc

SEQ ID NO: 72039 - DNA, 20 bp, Artificial Sequence
  chemically synthesized
ccccgtgcccgcactcaccc

SEQ ID NO: 72040 - DNA, 20 bp, Artificial Sequence
  chemically synthesized
gtgcccgcactcacccagga

SEQ ID NO: 72041 - DNA, 20 bp, Artificial Sequence
  chemically synthesized
cgcactcacccaggacggcg

SEQ ID NO: 72042 - DNA, 20 bp, Artificial Sequence
  chemically synthesized
tcacccaggacggcgcagac

SEQ ID NO: 72043 - DNA, 20 bp, Artificial Sequence
  chemically synthesized
cccaggacggcgcagaccag

SEQ ID NO: 72044 - DNA, 20 bp, Artificial Sequence
  chemically synthesized
ccaggacggcgcagaccagc

SEQ ID NO: 72045 - DNA, 20 bp, Artificial Sequence
  chemically synthesized
caggacggcgcagaccagca

SEQ ID NO: 72046 - DNA, 20 bp, Artificial Sequence
  chemically synthesized
gcagaccagcagggctccca

SEQ ID NO: 72047 - DNA, 20 bp, Artificial Sequence
  chemically synthesized
accagcagggctcccacggc

SEQ ID NO: 72048 - DNA, 20 bp, Artificial Sequence
  chemically synthesized
ccacggcgagcctcatcttc

SEQ ID NO: 72049 - DNA, 20 bp, Artificial Sequence
  chemically synthesized
cacggcgagcctcatcttcc

SEQ ID NO: 72050 - DNA, 20 bp, Artificial Sequence
  chemically synthesized
cgagcctcatcttccgggtg

SEQ ID NO: 72051 - DNA, 20 bp, Artificial Sequence
  chemically synthesized
catcttccgggtgcggcgct

SEQ ID NO: 72052 - DNA, 20 bp, Artificial Sequence
  chemically synthesized
cttccgggtgcggcgctgag

SEQ ID NO: 72053 - DNA, 20 bp, Artificial Sequence
  chemically synthesized
cgggtgcggcgctgagcagc

SEQ ID NO: 72054 - DNA, 20 bp, Artificial Sequence
  chemically synthesized
gcggcgctgagcagcgagca

SEQ ID NO: 72055 - DNA, 20 bp, Artificial Sequence
  chemically synthesized
cgctgagcagcgagcacagt

SEQ ID NO: 72056 - DNA, 20 bp, Artificial Sequence
  chemically synthesized
cagtcggactcgcttctgtg

SEQ ID NO: 72057 - DNA, 20 bp, Artificial Sequence
  chemically synthesized
actcgcttctgtgcagcctc

SEQ ID NO: 72058 - DNA, 20 bp, Artificial Sequence
  chemically synthesized
gcgtccctttattccattcc

SEQ ID NO: 72059 - DNA, 20 bp, Artificial Sequence
  chemically synthesized
cctttattccattcccggcc

SEQ ID NO: 72060 - DNA, 20 bp, Artificial Sequence
  chemically synthesized
ctttattccattcccggcct

SEQ ID NO: 72061 - DNA, 20 bp, Artificial Sequence
  chemically synthesized
tattccattcccggcctggg

SEQ ID NO: 72062 - DNA, 20 bp, Artificial Sequence
  chemically synthesized
attccattcccggcctgggc

SEQ ID NO: 72063 - DNA, 20 bp, Artificial Sequence
  chemically synthesized
cattcccggcctgggcgggc

SEQ ID NO: 72064 - DNA, 20 bp, Artificial Sequence
  chemically synthesized
attcccggcctgggcgggct

SEQ ID NO: 72065 - DNA, 20 bp, Artificial Sequence
  chemically synthesized
tttgacctcccgtgtttgtg

SEQ ID NO: 72066 - DNA, 20 bp, Artificial Sequence
  chemically synthesized
acctcccgtgtttgtgcagc

SEQ ID NO: 72067 - DNA, 20 bp, Artificial Sequence
  chemically synthesized
cctcccgtgtttgtgcagcc

SEQ ID NO: 72068 - DNA, 20 bp, Artificial Sequence
  chemically synthesized
cactgatcacctcattttct

SEQ ID NO: 72069 - DNA, 20 bp, Artificial Sequence
  chemically synthesized
tcacctcattttctgagctc

SEQ ID NO: 72070 - DNA, 20 bp, Artificial Sequence
  chemically synthesized
acctcattttctgagctctg

SEQ ID NO: 72071 - DNA, 20 bp, Artificial Sequence
  chemically synthesized
gagctctggagacgacccgc

SEQ ID NO: 72072 - DNA, 20 bp, Artificial Sequence
  chemically synthesized
ctctggagacgacccgcgag

SEQ ID NO: 72073 - DNA, 20 bp, Artificial Sequence
  chemically synthesized
tggagacgacccgcgagtgg

SEQ ID NO: 72074 - DNA, 20 bp, Artificial Sequence
  chemically synthesized
ggagacgacccgcgagtgga

SEQ ID NO: 72075 - DNA, 20 bp, Artificial Sequence
  chemically synthesized
agacgacccgcgagtggaag

SEQ ID NO: 72076 - DNA, 20 bp, Artificial Sequence
  chemically synthesized
acccgcgagtggaaggagtc

SEQ ID NO: 72077 - DNA, 20 bp, Artificial Sequence
  chemically synthesized
cgagtggaaggagtccagca

SEQ ID NO: 72078 - DNA, 20 bp, Artificial Sequence
  chemically synthesized
gtccagcacagaaatgttga

SEQ ID NO: 72079 - DNA, 20 bp, Artificial Sequence
  chemically synthesized
tccagcacagaaatgttgat

SEQ ID NO: 72080 - DNA, 20 bp, Artificial Sequence
  chemically synthesized
agcacagaaatgttgatggg

SEQ ID NO: 72081 - DNA, 20 bp, Artificial Sequence
  chemically synthesized
gcacagaaatgttgatggga

SEQ ID NO: 72082 - DNA, 20 bp, Artificial Sequence
  chemically synthesized
cacagaaatgttgatgggaa

SEQ ID NO: 72083 - DNA, 20 bp, Artificial Sequence
  chemically synthesized
tgttgatgggaagggacatg

SEQ ID NO: 72084 - DNA, 20 bp, Artificial Sequence
  chemically synthesized
aagggacatgaagcacaatg

SEQ ID NO: 72085 - DNA, 20 bp, Artificial Sequence
  chemically synthesized
caatgcagccattgtcatcg

SEQ ID NO: 72086 - DNA, 20 bp, Artificial Sequence
  chemically synthesized
cattgtcatcgcggctcgct

SEQ ID NO: 72087 - DNA, 20 bp, Artificial Sequence
  chemically synthesized
gtgctggactccttccactc

SEQ ID NO: 72088 - DNA, 20 bp, Artificial Sequence
  chemically synthesized
aaaatgaggtgatcagtggg

SEQ ID NO: 72089 - DNA, 20 bp, Artificial Sequence
  chemically synthesized
cagtgggacgagtaaggaag

SEQ ID NO: 72090 - DNA, 20 bp, Artificial Sequence
  chemically synthesized
gcgcccagcccgcccaggcc

SEQ ID NO: 72091 - DNA, 20 bp, Artificial Sequence
  chemically synthesized
cagcccgcccaggccgggaa

SEQ ID NO: 72092 - DNA, 20 bp, Artificial Sequence
  chemically synthesized
gcgccggaggctgcacagaa

SEQ ID NO: 72093 - DNA, 20 bp, Artificial Sequence
  chemically synthesized
ccctgctggtctgcgccgtc

SEQ ID NO: 72094 - DNA, 20 bp, Artificial Sequence
  chemically synthesized
gctggtctgcgccgtcctgg

SEQ ID NO: 72095 - DNA, 20 bp, Artificial Sequence
  chemically synthesized
gtcctgggtgagtgcgggca

SEQ ID NO: 72096 - DNA, 20 bp, Artificial Sequence
  chemically synthesized
gcgggcacggggtagcaccg

SEQ ID NO: 72097 - DNA, 20 bp, Artificial Sequence
  chemically synthesized
tccgcgctcaggctggaagc

SEQ ID NO: 72098 - DNA, 20 bp, Artificial Sequence
  chemically synthesized
caggctggaagcctgggtgt

SEQ ID NO: 72099 - DNA, 20 bp, Artificial Sequence
  chemically synthesized
agcatggcattcaaggcctc

SEQ ID NO: 72100 - DNA, 20 bp, Artificial Sequence
  chemically synthesized
ctttcagaggctgatgtccc

SEQ ID NO: 72101 - DNA, 20 bp, Artificial Sequence
  chemically synthesized
gccatcgagcggtcagagca

SEQ ID NO: 72102 - DNA, 20 bp, Artificial Sequence
  chemically synthesized
ggggtttgaagccagacttc

SEQ ID NO: 72103 - DNA, 20 bp, Artificial Sequence
  chemically synthesized
ggccggctcctcaccaggga

SEQ ID NO: 72104 - DNA, 20 bp, Artificial Sequence
  chemically synthesized
tcatcacagcacttgcctgg

SEQ ID NO: 72105 - DNA, 20 bp, Artificial Sequence
  chemically synthesized
cttgcctgggagggtcaaat

SEQ ID NO: 72106 - DNA, 20 bp, Artificial Sequence
  chemically synthesized
ggtcagcgaggtggcagatg

SEQ ID NO: 72107 - DNA, 20 bp, Artificial Sequence
  chemically synthesized
cacaggcttatgttgcctcc

SEQ ID NO: 72108 - DNA, 20 bp, Artificial Sequence
  chemically synthesized
catgggccaagagggaaaat

SEQ ID NO: 72109 - DNA, 20 bp, Artificial Sequence
  chemically synthesized
agagggaaaatgggggtcgc

SEQ ID NO: 72110 - DNA, 20 bp, Artificial Sequence
  chemically synthesized
gcctcctctccacaggcttt

SEQ ID NO: 72111 - DNA, 20 bp, Artificial Sequence
  chemically synthesized
gtggatcttcttcagagcca

SEQ ID NO: 72112 - DNA, 20 bp, Artificial Sequence
  chemically synthesized
ccttgctgtggtggcccaca

SEQ ID NO: 72113 - DNA, 20 bp, Artificial Sequence
  chemically synthesized
agggcaaaagctcatgtgat

SEQ ID NO: 72114 - DNA, 20 bp, Artificial Sequence
  chemically synthesized
gatgctgtctctgcaaccac

SEQ ID NO: 72115 - DNA, 20 bp, Artificial Sequence
  chemically synthesized
ggctggcttcagcttttttt

SEQ ID NO: 72116 - DNA, 20 bp, Artificial Sequence
  chemically synthesized
aaaaagtgtggtgaaaatgg

SEQ ID NO: 72117 - DNA, 20 bp, Artificial Sequence
  chemically synthesized
tggagacagaggggagactg

SEQ ID NO: 72118 - DNA, 20 bp, Artificial Sequence
  chemically synthesized
aggggagactgttgaatttg

SEQ ID NO: 72119 - DNA, 20 bp, Artificial Sequence
  chemically synthesized
ctaaacagagagcaacagac

SEQ ID NO: 72120 - DNA, 20 bp, Artificial Sequence
  chemically synthesized
ccctcaactactggccaaga

SEQ ID NO: 72121 - DNA, 20 bp, Artificial Sequence
  chemically synthesized
ggccaagaaggggtgtaact

SEQ ID NO: 72122 - DNA, 20 bp, Artificial Sequence
  chemically synthesized
atgttttcttcttttgtgcc

SEQ ID NO: 72123 - DNA, 20 bp, Artificial Sequence
  chemically synthesized
tgtgccctgagtagcagacc

SEQ ID NO: 72124 - DNA, 20 bp, Artificial Sequence
  chemically synthesized
ctggcttggccaacgacaag

SEQ ID NO: 72125 - DNA, 20 bp, Artificial Sequence
  chemically synthesized
caacgacaagcagggtgacc

SEQ ID NO: 72126 - DNA, 20 bp, Artificial Sequence
  chemically synthesized
aaaaaaaaaggcatcattct

SEQ ID NO: 72127 - DNA, 20 bp, Artificial Sequence
  chemically synthesized
gaggtagcaagccaatgtgt

SEQ ID NO: 72128 - DNA, 20 bp, Artificial Sequence
  chemically synthesized
cagtgatgggaggagacaag

SEQ ID NO: 72129 - DNA, 20 bp, Artificial Sequence
  chemically synthesized
ctgcacccctctggccagca

SEQ ID NO: 72130 - DNA, 20 bp, Artificial Sequence
  chemically synthesized
accttctattggctcagact

SEQ ID NO: 72131 - DNA, 20 bp, Artificial Sequence
  chemically synthesized
gccctgtagtgttcatggac

SEQ ID NO: 72132 - DNA, 20 bp, Artificial Sequence
  chemically synthesized
tgagaggaggacaggactga

SEQ ID NO: 72133 - DNA, 20 bp, Artificial Sequence
  chemically synthesized
gctgtctctccctcagcata

SEQ ID NO: 72134 - DNA, 20 bp, Artificial Sequence
  chemically synthesized
agcatgaggccactaagtgc

SEQ ID NO: 72135 - DNA, 20 bp, Artificial Sequence
  chemically synthesized
cacaagcaacactgggacca

SEQ ID NO: 72136 - DNA, 20 bp, Artificial Sequence
  chemically synthesized
gcaacactgggaccatcgga

SEQ ID NO: 72137 - DNA, 20 bp, Artificial Sequence
  chemically synthesized
ggcacaagttctactgcatt

SEQ ID NO: 72138 - DNA, 20 bp, Artificial Sequence
  chemically synthesized
gaccaccctctgctggccag

SEQ ID NO: 72139 - DNA, 20 bp, Artificial Sequence
  chemically synthesized
ctatggaaaaccagcggggg

SEQ ID NO: 72140 - DNA, 20 bp, Artificial Sequence
  chemically synthesized
ttgccatctttttgagaaga

SEQ ID NO: 72141 - DNA, 20 bp, Artificial Sequence
  chemically synthesized
agaagagggagtgagactca

SEQ ID NO: 72142 - DNA, 20 bp, Artificial Sequence
  chemically synthesized
gtcgttggccaagccaggcc

SEQ ID NO: 72143 - DNA, 20 bp, Artificial Sequence
  chemically synthesized
ggccaagccaggcctagaat

SEQ ID NO: 72144 - DNA, 20 bp, Artificial Sequence
  chemically synthesized
agaatctgggtctccagact

SEQ ID NO: 72145 - DNA, 20 bp, Artificial Sequence
  chemically synthesized
gcacaaaagaagaaaacatt

SEQ ID NO: 72146 - DNA, 20 bp, Artificial Sequence
  chemically synthesized
ccccttcttggccagtagtt

SEQ ID NO: 72147 - DNA, 20 bp, Artificial Sequence
  chemically synthesized
gttgagggtaaattaacgaa

SEQ ID NO: 72148 - DNA, 20 bp, Artificial Sequence
  chemically synthesized
aaaaaaagctgaagccagcc

SEQ ID NO: 72149 - DNA, 20 bp, Artificial Sequence
  chemically synthesized
agaggaggcccacagctctc

SEQ ID NO: 72150 - DNA, 20 bp, Artificial Sequence
  chemically synthesized
atgcatgaggaggggccacc

SEQ ID NO: 72151 - DNA, 20 bp, Artificial Sequence
  chemically synthesized
cctccacaaagccctgcctc

SEQ ID NO: 72152 - DNA, 20 bp, Artificial Sequence
  chemically synthesized
cctccagagttcccataggc

SEQ ID NO: 72153 - DNA, 20 bp, Artificial Sequence
  chemically synthesized
gcctgtgaagtgctctgtgc

SEQ ID NO: 72154 - DNA, 20 bp, Artificial Sequence
  chemically synthesized
ggggataaaggcaagtaacg

SEQ ID NO: 72155 - DNA, 20 bp, Artificial Sequence
  chemically synthesized
taacgtggggtcctctctca

SEQ ID NO: 72156 - DNA, 20 bp, Artificial Sequence
  chemically synthesized
aacagtgtgacaaatgcccc

SEQ ID NO: 72157 - DNA, 20 bp, Artificial Sequence
  chemically synthesized
catgaatggcaggcagaagt

SEQ ID NO: 72158 - DNA, 20 bp, Artificial Sequence
  chemically synthesized
ggccccacctcaggaggtcg

SEQ ID NO: 72159 - DNA, 20 bp, Artificial Sequence
  chemically synthesized
cgtcagccactgccccatag

SEQ ID NO: 72160 - DNA, 20 bp, Artificial Sequence
  chemically synthesized
ggtgaggagccggccaggac

SEQ ID NO: 72161 - DNA, 20 bp, Artificial Sequence
  chemically synthesized
gggacatcagcctctgaaag

SEQ ID NO: 72162 - DNA, 20 bp, Artificial Sequence
  chemically synthesized
atggtcagacccgggaggcc

SEQ ID NO: 72163 - DNA, 20 bp, Artificial Sequence
  chemically synthesized
aggccttgaatgccatgcta

SEQ ID NO: 72164 - DNA, 20 bp, Artificial Sequence
  chemically synthesized
cttgacaagaggcagcagca

SEQ ID NO: 72165 - DNA, 20 bp, Artificial Sequence
  chemically synthesized
aggaggagggggagaagaca

SEQ ID NO: 72166 - DNA, 20 bp, Artificial Sequence
  chemically synthesized
tagaagcccaagcaaaggcc

SEQ ID NO: 72167 - DNA, 20 bp, Artificial Sequence
  chemically synthesized
ccaggcttccagcctgagcg

SEQ ID NO: 72168 - DNA, 20 bp, Artificial Sequence
  chemically synthesized
gcaggctgcgcggtggccgc

SEQ ID NO: 72169 - DNA, 20 bp, Artificial Sequence
  chemically synthesized
cccacggcgagcctcatctt

SEQ ID NO: 72170 - DNA, 20 bp, Artificial Sequence
  chemically synthesized
gacctcccgtgtttgtgcag

SEQ ID NO: 72171 - DNA, 20 bp, Artificial Sequence
  chemically synthesized
ctgagctctggagacgaccc

SEQ ID NO: 72172 - DNA, 20 bp, Artificial Sequence
  chemically synthesized
ggagacgacccgcgagtgga

SEQ ID NO: 72173 - DNA, 20 bp, Artificial Sequence
  chemically synthesized
tcgcgggtcgtctccagagc

SEQ ID NO: 72174 - DNA, 20 bp, Artificial Sequence
  chemically synthesized
tggccaagaaggggtgtaac

SEQ ID NO: 72175 - DNA, 20 bp, Artificial Sequence
  chemically synthesized
aaccttctattggctcagac

SEQ ID NO: 72176 - DNA, 20 bp, Artificial Sequence
  chemically synthesized
ggtcccagtgttgcttgtgt

SEQ ID NO: 72177 - DNA, 20 bp, Artificial Sequence
  chemically synthesized
agggagagacagcatcgccc

SEQ ID NO: 72178 - DNA, 20 bp, Artificial Sequence
  chemically synthesized
gagaagagggagtgagactc

SEQ ID NO: 72179 - DNA, 20 bp, Artificial Sequence
  chemically synthesized
tgtcgttggccaagccaggc

SEQ ID NO: 72180 - DNA, 20 bp, Artificial Sequence
  chemically synthesized
ctgctactcagggcacaaaa

SEQ ID NO: 72181 - DNA, 20 bp, Artificial Sequence
  chemically synthesized
agttgagggtaaattaacga

SEQ ID NO: 72182 - DNA, 20 bp, Artificial Sequence
  chemically synthesized
gcctccagagttcccatagg

SEQ ID NO: 72183 - DNA, 20 bp, Artificial Sequence
  chemically synthesized
ggaattgctagcttatgggg

SEQ ID NO: 72184 - DNA, 20 bp, Artificial Sequence
  chemically synthesized
gcgagtggaaggagtccagc

SEQ ID NO: 72185 - DNA, 20 bp, Artificial Sequence
  chemically synthesized
agcacgtctaaccaggttat

SEQ ID NO: 72186 - DNA, 20 bp, Artificial Sequence
  chemically synthesized
gccaatgtgttggggtagct

SEQ ID NO: 72187 - DNA, 20 bp, Artificial Sequence
  chemically synthesized
ctgtgtctggctgtccctga

SEQ ID NO: 72188 - DNA, 20 bp, Artificial Sequence
  chemically synthesized
ggcttgctacctcaactatg

SEQ ID NO: 72189 - DNA, 20 bp, Artificial Sequence
  chemically synthesized
ctactcagggcacaaaagaa

SEQ ID NO: 72190 - DNA, 20 bp, Artificial Sequence
  chemically synthesized
ctctctgtttaggaagaact

SEQ ID NO: 72191 - DNA, 20 bp, Artificial Sequence
  chemically synthesized
attgctagcttatggggaga

SEQ ID NO: 72192 - DNA, 20 bp, Artificial Sequence
  chemically synthesized
ccgcgatgacaatggctgca

SEQ ID NO: 72193 - DNA, 20 bp, Artificial Sequence
  chemically synthesized
aggaaggggggttgggagag

SEQ ID NO: 72194 - DNA, 20 bp, Artificial Sequence
  chemically synthesized
gctgcacaaacacgggaggt

SEQ ID NO: 72195 - DNA, 20 bp, Artificial Sequence
  chemically synthesized
ctctacgccccacccctggc

SEQ ID NO: 72196 - DNA, 20 bp, Artificial Sequence
  chemically synthesized
gccccacccctggcctttgc

SEQ ID NO: 72197 - DNA, 20 bp, Artificial Sequence
  chemically synthesized
gccatcgagcggtcagagca

SEQ ID NO: 72198 - DNA, 20 bp, Artificial Sequence
  chemically synthesized
tggggcatttgtcacactgt

SEQ ID NO: 72199 - DNA, 20 bp, Artificial Sequence
  chemically synthesized
ttgtcacactgttggggctt

SEQ ID NO: 72200 - DNA, 20 bp, Artificial Sequence
  chemically synthesized
acactgttggggcttccacg

SEQ ID NO: 72201 - DNA, 20 bp, Artificial Sequence
  chemically synthesized
gcctatgggaactctggagg

SEQ ID NO: 72202 - DNA, 20 bp, Artificial Sequence
  chemically synthesized
ggctttgtggaggggctgcc

SEQ ID NO: 72203 - DNA, 20 bp, Artificial Sequence
  chemically synthesized
ccacaggcttatgttgcctc

SEQ ID NO: 72204 - DNA, 20 bp, Artificial Sequence
  chemically synthesized
gagctgtgggcctcctctcc

SEQ ID NO: 72205 - DNA, 20 bp, Artificial Sequence
  chemically synthesized
ggatgctgtctctgcaacca

SEQ ID NO: 72206 - DNA, 20 bp, Artificial Sequence
  chemically synthesized
gattttaatagttacccatg

SEQ ID NO: 72207 - DNA, 20 bp, Artificial Sequence
  chemically synthesized
aatagttacccatggctggc

SEQ ID NO: 72208 - DNA, 20 bp, Artificial Sequence
  chemically synthesized
aggggagactgttgaatttg

SEQ ID NO: 72209 - DNA, 20 bp, Artificial Sequence
  chemically synthesized
ccaagaaggggtgtaactca

SEQ ID NO: 72210 - DNA, 20 bp, Artificial Sequence
  chemically synthesized
gcagacccagagtctggaga

SEQ ID NO: 72211 - DNA, 20 bp, Artificial Sequence
  chemically synthesized
ctggagacccagattctagg

SEQ ID NO: 72212 - DNA, 20 bp, Artificial Sequence
  chemically synthesized
aagatggcaattcctccccc

SEQ ID NO: 72213 - DNA, 20 bp, Artificial Sequence
  chemically synthesized
tgaaaacgccctgtgcatac

SEQ ID NO: 72214 - DNA, 20 bp, Artificial Sequence
  chemically synthesized
agacaaggcggatacagagg

SEQ ID NO: 72215 - DNA, 20 bp, Artificial Sequence
  chemically synthesized
agcatgaggccactaagtgc

SEQ ID NO: 72216 - DNA, 20 bp, Artificial Sequence
  chemically synthesized
attccatccgatggtcccag

SEQ ID NO: 72217 - DNA, 20 bp, Artificial Sequence
  chemically synthesized
tgtgtgaagaaagcctccta

SEQ ID NO: 72218 - DNA, 20 bp, Artificial Sequence
  chemically synthesized
gccctgatgcaatcaaggta

SEQ ID NO: 72219 - DNA, 20 bp, Artificial Sequence
  chemically synthesized
actgggaccatcggatggaa

SEQ ID NO: 72220 - DNA, 20 bp, Artificial Sequence
  chemically synthesized
tccgacactgcacaccatct

SEQ ID NO: 72221 - DNA, 20 bp, Artificial Sequence
  chemically synthesized
gaaggttgccctaatggcct

SEQ ID NO: 72222 - DNA, 20 bp, Artificial Sequence
  chemically synthesized
cataagcctcagtatgcaca

SEQ ID NO: 72223 - DNA, 20 bp, Artificial Sequence
  chemically synthesized
gttttcagctaccccaacac

SEQ ID NO: 72224 - DNA, 20 bp, Artificial Sequence
  chemically synthesized
ttttttttaacccaaggtca

SEQ ID NO: 72225 - DNA, 20 bp, Artificial Sequence
  chemically synthesized
tgtaactcttgtctgttgct

SEQ ID NO: 72226 - DNA, 20 bp, Artificial Sequence
  chemically synthesized
agagacagcatccctatcac

SEQ ID NO: 72227 - DNA, 20 bp, Artificial Sequence
  chemically synthesized
gggtcctctctcaaggaatt

SEQ ID NO: 72228 - DNA, 20 bp, Artificial Sequence
  chemically synthesized
caggacttggatccaagaag

SEQ ID NO: 72229 - DNA, 20 bp, Artificial Sequence
  chemically synthesized
atgctctgaccgctcgatgg

SEQ ID NO: 72230 - DNA, 20 bp, Artificial Sequence
  chemically synthesized
cttgacaagaggcagcagca

SEQ ID NO: 72231 - DNA, 20 bp, Artificial Sequence
  chemically synthesized
tgataacctggttagacgtg

SEQ ID NO: 72232 - DNA, 20 bp, Artificial Sequence
  chemically synthesized
atttattgtatttcactgct

SEQ ID NO: 72233 - DNA, 20 bp, Artificial Sequence
  chemically synthesized
atggaaaggcacccagacac

SEQ ID NO: 72234 - DNA, 20 bp, Artificial Sequence
  chemically synthesized
tgagcagcgagcacagtcgg

SEQ ID NO: 72235 - DNA, 20 bp, Artificial Sequence
  chemically synthesized
tgggcgcaatctttgacctc

SEQ ID NO: 72236 - DNA, 22 bp, Artificial Sequence
  chemically synthesized
cattgtgcttcatgtcccttcc

SEQ ID NO: 72237 - DNA, 22 bp, Artificial Sequence
  chemically synthesized
tgcttcatgtcccttcccatca

SEQ ID NO: 72238 - DNA, 22 bp, Artificial Sequence
  chemically synthesized
catgtcccttcccatcaacatt

SEQ ID NO: 72239 - DNA, 22 bp, Artificial Sequence
  chemically synthesized
atgtcccttcccatcaacattt

SEQ ID NO: 72240 - DNA, 22 bp, Artificial Sequence
  chemically synthesized
cccatcaacatttctgtgctgg

SEQ ID NO: 72241 - DNA, 22 bp, Artificial Sequence
  chemically synthesized
ccatcaacatttctgtgctgga

SEQ ID NO: 72242 - DNA, 22 bp, Artificial Sequence
  chemically synthesized
ctgtgctggactccttccactc

SEQ ID NO: 72243 - DNA, 22 bp, Artificial Sequence
  chemically synthesized
tgtgctggactccttccactcg

SEQ ID NO: 72244 - DNA, 22 bp, Artificial Sequence
  chemically synthesized
tgctggactccttccactcgcg

SEQ ID NO: 72245 - DNA, 22 bp, Artificial Sequence
  chemically synthesized
gactccttccactcgcgggtcg

SEQ ID NO: 72246 - DNA, 22 bp, Artificial Sequence
  chemically synthesized
cttccactcgcgggtcgtctcc

SEQ ID NO: 72247 - DNA, 22 bp, Artificial Sequence
  chemically synthesized
ccactcgcgggtcgtctccaga

SEQ ID NO: 72248 - DNA, 22 bp, Artificial Sequence
  chemically synthesized
cactcgcgggtcgtctccagag

SEQ ID NO: 72249 - DNA, 22 bp, Artificial Sequence
  chemically synthesized
gcgggtcgtctccagagctcag

SEQ ID NO: 72250 - DNA, 22 bp, Artificial Sequence
  chemically synthesized
cagagctcagaaaatgaggtga

SEQ ID NO: 72251 - DNA, 22 bp, Artificial Sequence
  chemically synthesized
agaaaatgaggtgatcagtggg

SEQ ID NO: 72252 - DNA, 22 bp, Artificial Sequence
  chemically synthesized
ggagaggggcgattgggcaacc

SEQ ID NO: 72253 - DNA, 22 bp, Artificial Sequence
  chemically synthesized
ggcaacccggctgcacaaacac

SEQ ID NO: 72254 - DNA, 22 bp, Artificial Sequence
  chemically synthesized
cacaaacacgggaggtcaaaga

SEQ ID NO: 72255 - DNA, 22 bp, Artificial Sequence
  chemically synthesized
cgcccagcccgcccaggccggg

SEQ ID NO: 72256 - DNA, 22 bp, Artificial Sequence
  chemically synthesized
cacagaagcgagtccgactgtg

SEQ ID NO: 72257 - DNA, 22 bp, Artificial Sequence
  chemically synthesized
tgctcgctgctcagcgccgcac

SEQ ID NO: 72258 - DNA, 22 bp, Artificial Sequence
  chemically synthesized
gctgctcagcgccgcacccgga

SEQ ID NO: 72259 - DNA, 22 bp, Artificial Sequence
  chemically synthesized
ctcagcgccgcacccggaagat

SEQ ID NO: 72260 - DNA, 22 bp, Artificial Sequence
  chemically synthesized
agcgccgcacccggaagatgag

SEQ ID NO: 72261 - DNA, 22 bp, Artificial Sequence
  chemically synthesized
gccgtgggagccctgctggtct

SEQ ID NO: 72262 - DNA, 22 bp, Artificial Sequence
  chemically synthesized
ctggtctgcgccgtcctgggtg

SEQ ID NO: 72263 - DNA, 22 bp, Artificial Sequence
  chemically synthesized
gtctgcgccgtcctgggtgagt

SEQ ID NO: 72264 - DNA, 22 bp, Artificial Sequence
  chemically synthesized
cgccgtcctgggtgagtgcggg

SEQ ID NO: 72265 - DNA, 22 bp, Artificial Sequence
  chemically synthesized
ggtgagtgcgggcacggggtag

SEQ ID NO: 72266 - DNA, 22 bp, Artificial Sequence
  chemically synthesized
gcccgcgcgttccctgcaaccc

SEQ ID NO: 72267 - DNA, 22 bp, Artificial Sequence
  chemically synthesized
cctgcaacccgggcggccaccg

SEQ ID NO: 72268 - DNA, 22 bp, Artificial Sequence
  chemically synthesized
caacccgggcggccaccgcgca

SEQ ID NO: 72269 - DNA, 22 bp, Artificial Sequence
  chemically synthesized
catgcactccgcgctcaggctg

SEQ ID NO: 72270 - DNA, 22 bp, Artificial Sequence
  chemically synthesized
cgcgctcaggctggaagcctgg

SEQ ID NO: 72271 - DNA, 22 bp, Artificial Sequence
  chemically synthesized
aggctggaagcctgggtgtctg

SEQ ID NO: 72272 - DNA, 22 bp, Artificial Sequence
  chemically synthesized
gaagcctgggtgtctgggtgcc

SEQ ID NO: 72273 - DNA, 22 bp, Artificial Sequence
  chemically synthesized
ggtgtctgggtgcctttccatt

SEQ ID NO: 72274 - DNA, 22 bp, Artificial Sequence
  chemically synthesized
ggtgcctttccattgcctctct

SEQ ID NO: 72275 - DNA, 22 bp, Artificial Sequence
  chemically synthesized
tccattgcctctctacgcccca

SEQ ID NO: 72276 - DNA, 22 bp, Artificial Sequence
  chemically synthesized
ccattgcctctctacgccccac

SEQ ID NO: 72277 - DNA, 22 bp, Artificial Sequence
  chemically synthesized
cattgcctctctacgccccacc

SEQ ID NO: 72278 - DNA, 22 bp, Artificial Sequence
  chemically synthesized
cctctctacgccccacccctgg

SEQ ID NO: 72279 - DNA, 22 bp, Artificial Sequence
  chemically synthesized
tctacgccccacccctggcctt

SEQ ID NO: 72280 - DNA, 22 bp, Artificial Sequence
  chemically synthesized
tacgccccacccctggcctttg

SEQ ID NO: 72281 - DNA, 22 bp, Artificial Sequence
  chemically synthesized
cgccccacccctggcctttgct

SEQ ID NO: 72282 - DNA, 22 bp, Artificial Sequence
  chemically synthesized
gcctttgcttgggcttctagac

SEQ ID NO: 72283 - DNA, 22 bp, Artificial Sequence
  chemically synthesized
tgcttgggcttctagacacctt

SEQ ID NO: 72284 - DNA, 22 bp, Artificial Sequence
  chemically synthesized
gcttgggcttctagacaccttt

SEQ ID NO: 72285 - DNA, 22 bp, Artificial Sequence
  chemically synthesized
cttgggcttctagacacctttc

SEQ ID NO: 72286 - DNA, 22 bp, Artificial Sequence
  chemically synthesized
gggcttctagacacctttcact

SEQ ID NO: 72287 - DNA, 22 bp, Artificial Sequence
  chemically synthesized
ggcttctagacacctttcactg

SEQ ID NO: 72288 - DNA, 22 bp, Artificial Sequence
  chemically synthesized
ctagacacctttcactgcactc

SEQ ID NO: 72289 - DNA, 22 bp, Artificial Sequence
  chemically synthesized
tagacacctttcactgcactca

SEQ ID NO: 72290 - DNA, 22 bp, Artificial Sequence
  chemically synthesized
gacacctttcactgcactcact

SEQ ID NO: 72291 - DNA, 22 bp, Artificial Sequence
  chemically synthesized
tcactgcactcactgtcttctc

SEQ ID NO: 72292 - DNA, 22 bp, Artificial Sequence
  chemically synthesized
cactgcactcactgtcttctcc

SEQ ID NO: 72293 - DNA, 22 bp, Artificial Sequence
  chemically synthesized
actgcactcactgtcttctccc

SEQ ID NO: 72294 - DNA, 22 bp, Artificial Sequence
  chemically synthesized
cactcactgtcttctccccctc

SEQ ID NO: 72295 - DNA, 22 bp, Artificial Sequence
  chemically synthesized
actgtcttctccccctcctcct

SEQ ID NO: 72296 - DNA, 22 bp, Artificial Sequence
  chemically synthesized
tcttctccccctcctcctcttt

SEQ ID NO: 72297 - DNA, 22 bp, Artificial Sequence
  chemically synthesized
ctccccctcctcctctttgtcc

SEQ ID NO: 72298 - DNA, 22 bp, Artificial Sequence
  chemically synthesized
tccccctcctcctctttgtcca

SEQ ID NO: 72299 - DNA, 22 bp, Artificial Sequence
  chemically synthesized
cccctcctcctctttgtccagt

SEQ ID NO: 72300 - DNA, 22 bp, Artificial Sequence
  chemically synthesized
ctcctctttgtccagtaaatct

SEQ ID NO: 72301 - DNA, 22 bp, Artificial Sequence
  chemically synthesized
ctctttgtccagtaaatcttgc

SEQ ID NO: 72302 - DNA, 22 bp, Artificial Sequence
  chemically synthesized
tttgtccagtaaatcttgcagc

SEQ ID NO: 72303 - DNA, 22 bp, Artificial Sequence
  chemically synthesized
tgtccagtaaatcttgcagcag

SEQ ID NO: 72304 - DNA, 22 bp, Artificial Sequence
  chemically synthesized
gtccagtaaatcttgcagcagt

SEQ ID NO: 72305 - DNA, 22 bp, Artificial Sequence
  chemically synthesized
tccagtaaatcttgcagcagtg

SEQ ID NO: 72306 - DNA, 22 bp, Artificial Sequence
  chemically synthesized
gcagcagtgaaatacaataaat

SEQ ID NO: 72307 - DNA, 22 bp, Artificial Sequence
  chemically synthesized
cagcagtgaaatacaataaatc

SEQ ID NO: 72308 - DNA, 22 bp, Artificial Sequence
  chemically synthesized
accaggttatcaaaaccctttg

SEQ ID NO: 72309 - DNA, 22 bp, Artificial Sequence
  chemically synthesized
tcaaaaccctttgctgctgcct

SEQ ID NO: 72310 - DNA, 22 bp, Artificial Sequence
  chemically synthesized
tgctgctgcctcttgtcaagtc

SEQ ID NO: 72311 - DNA, 22 bp, Artificial Sequence
  chemically synthesized
gctgctgcctcttgtcaagtcc

SEQ ID NO: 72312 - DNA, 22 bp, Artificial Sequence
  chemically synthesized
ctgctgcctcttgtcaagtccg

SEQ ID NO: 72313 - DNA, 22 bp, Artificial Sequence
  chemically synthesized
ctgcctcttgtcaagtccgaac

SEQ ID NO: 72314 - DNA, 22 bp, Artificial Sequence
  chemically synthesized
cctcttgtcaagtccgaactcc

SEQ ID NO: 72315 - DNA, 22 bp, Artificial Sequence
  chemically synthesized
ttgtcaagtccgaactccttag

SEQ ID NO: 72316 - DNA, 22 bp, Artificial Sequence
  chemically synthesized
gtcaagtccgaactccttagca

SEQ ID NO: 72317 - DNA, 22 bp, Artificial Sequence
  chemically synthesized
tcaagtccgaactccttagcat

SEQ ID NO: 72318 - DNA, 22 bp, Artificial Sequence
  chemically synthesized
cttagcatggcattcaaggcct

SEQ ID NO: 72319 - DNA, 22 bp, Artificial Sequence
  chemically synthesized
agcatggcattcaaggcctccc

SEQ ID NO: 72320 - DNA, 22 bp, Artificial Sequence
  chemically synthesized
gcatggcattcaaggcctcccg

SEQ ID NO: 72321 - DNA, 22 bp, Artificial Sequence
  chemically synthesized
aaggcctcccgggtctgaccat

SEQ ID NO: 72322 - DNA, 22 bp, Artificial Sequence
  chemically synthesized
ccgggtctgaccattccccttt

SEQ ID NO: 72323 - DNA, 22 bp, Artificial Sequence
  chemically synthesized
accattcccctttcagaggctg

SEQ ID NO: 72324 - DNA, 22 bp, Artificial Sequence
  chemically synthesized
ccctttcagaggctgatgtccc

SEQ ID NO: 72325 - DNA, 22 bp, Artificial Sequence
  chemically synthesized
tcagaggctgatgtcccctggg

SEQ ID NO: 72326 - DNA, 22 bp, Artificial Sequence
  chemically synthesized
cagaggctgatgtcccctgggt

SEQ ID NO: 72327 - DNA, 22 bp, Artificial Sequence
  chemically synthesized
agaggctgatgtcccctgggtg

SEQ ID NO: 72328 - DNA, 22 bp, Artificial Sequence
  chemically synthesized
atgtcccctgggtgccctggga

SEQ ID NO: 72329 - DNA, 22 bp, Artificial Sequence
  chemically synthesized
ggtgccctgggagctgtagatg

SEQ ID NO: 72330 - DNA, 22 bp, Artificial Sequence
  chemically synthesized
ggagctgtagatgtcctgccaa

SEQ ID NO: 72331 - DNA, 22 bp, Artificial Sequence
  chemically synthesized
tagatgtcctgccaaggaagcg

SEQ ID NO: 72332 - DNA, 22 bp, Artificial Sequence
  chemically synthesized
ccaaggaagcggtgccatcgag

SEQ ID NO: 72333 - DNA, 22 bp, Artificial Sequence
  chemically synthesized
gaagccagacttcttggatcca

SEQ ID NO: 72334 - DNA, 22 bp, Artificial Sequence
  chemically synthesized
aagccagacttcttggatccaa

SEQ ID NO: 72335 - DNA, 22 bp, Artificial Sequence
  chemically synthesized
cttggatccaagtcctggccgg

SEQ ID NO: 72336 - DNA, 22 bp, Artificial Sequence
  chemically synthesized
ttggatccaagtcctggccggc

SEQ ID NO: 72337 - DNA, 22 bp, Artificial Sequence
  chemically synthesized
ggatccaagtcctggccggctc

SEQ ID NO: 72338 - DNA, 22 bp, Artificial Sequence
  chemically synthesized
gatccaagtcctggccggctcc

SEQ ID NO: 72339 - DNA, 22 bp, Artificial Sequence
  chemically synthesized
gccggctcctcaccagggaggg

SEQ ID NO: 72340 - DNA, 22 bp, Artificial Sequence
  chemically synthesized
ctcaccagggagggggtcatca

SEQ ID NO: 72341 - DNA, 22 bp, Artificial Sequence
  chemically synthesized
accagggagggggtcatcacag

SEQ ID NO: 72342 - DNA, 22 bp, Artificial Sequence
  chemically synthesized
gcctgggagggtcaaatgaggg

SEQ ID NO: 72343 - DNA, 22 bp, Artificial Sequence
  chemically synthesized
cctgggagggtcaaatgagggt

SEQ ID NO: 72344 - DNA, 22 bp, Artificial Sequence
  chemically synthesized
ggagggtcaaatgagggtcagc

SEQ ID NO: 72345 - DNA, 22 bp, Artificial Sequence
  chemically synthesized
agtaccagtggcagatgttgca

SEQ ID NO: 72346 - DNA, 22 bp, Artificial Sequence
  chemically synthesized
cacacatcctgctatggggcag

SEQ ID NO: 72347 - DNA, 22 bp, Artificial Sequence
  chemically synthesized
ctatggggcagtggctgacgcc

SEQ ID NO: 72348 - DNA, 22 bp, Artificial Sequence
  chemically synthesized
tggggcagtggctgacgccaca

SEQ ID NO: 72349 - DNA, 22 bp, Artificial Sequence
  chemically synthesized
acgccacactccccgacctcct

SEQ ID NO: 72350 - DNA, 22 bp, Artificial Sequence
  chemically synthesized
cccgacctcctgaggtggggcc

SEQ ID NO: 72351 - DNA, 22 bp, Artificial Sequence
  chemically synthesized
ctgaggtggggcccccttcata

SEQ ID NO: 72352 - DNA, 22 bp, Artificial Sequence
  chemically synthesized
aggtggggcccccttcatactc

SEQ ID NO: 72353 - DNA, 22 bp, Artificial Sequence
  chemically synthesized
catactctaacttctgcctgcc

SEQ ID NO: 72354 - DNA, 22 bp, Artificial Sequence
  chemically synthesized
atactctaacttctgcctgcca

SEQ ID NO: 72355 - DNA, 22 bp, Artificial Sequence
  chemically synthesized
taacttctgcctgccattcatg

SEQ ID NO: 72356 - DNA, 22 bp, Artificial Sequence
  chemically synthesized
acttctgcctgccattcatggg

SEQ ID NO: 72357 - DNA, 22 bp, Artificial Sequence
  chemically synthesized
ctgcctgccattcatggggcat

SEQ ID NO: 72358 - DNA, 22 bp, Artificial Sequence
  chemically synthesized
tgcctgccattcatggggcatt

SEQ ID NO: 72359 - DNA, 22 bp, Artificial Sequence
  chemically synthesized
cctgccattcatggggcatttg

SEQ ID NO: 72360 - DNA, 22 bp, Artificial Sequence
  chemically synthesized
ccattcatggggcatttgtcac

SEQ ID NO: 72361 - DNA, 22 bp, Artificial Sequence
  chemically synthesized
atggggcatttgtcacactgtt

SEQ ID NO: 72362 - DNA, 22 bp, Artificial Sequence
  chemically synthesized
gtcacactgttggggcttccac

SEQ ID NO: 72363 - DNA, 22 bp, Artificial Sequence
  chemically synthesized
tcacactgttggggcttccacg

SEQ ID NO: 72364 - DNA, 22 bp, Artificial Sequence
  chemically synthesized
ttggggcttccacgtttagttt

SEQ ID NO: 72365 - DNA, 22 bp, Artificial Sequence
  chemically synthesized
gggcttccacgtttagttttct

SEQ ID NO: 72366 - DNA, 22 bp, Artificial Sequence
  chemically synthesized
ccacgtttagttttctctcccc

SEQ ID NO: 72367 - DNA, 22 bp, Artificial Sequence
  chemically synthesized
cacgtttagttttctctcccca

SEQ ID NO: 72368 - DNA, 22 bp, Artificial Sequence
  chemically synthesized
agttttctctccccataagcta

SEQ ID NO: 72369 - DNA, 22 bp, Artificial Sequence
  chemically synthesized
gttttctctccccataagctag

SEQ ID NO: 72370 - DNA, 22 bp, Artificial Sequence
  chemically synthesized
tctctccccataagctagcaat

SEQ ID NO: 72371 - DNA, 22 bp, Artificial Sequence
  chemically synthesized
ctctccccataagctagcaatt

SEQ ID NO: 72372 - DNA, 22 bp, Artificial Sequence
  chemically synthesized
tctccccataagctagcaattc

SEQ ID NO: 72373 - DNA, 22 bp, Artificial Sequence
  chemically synthesized
tccccataagctagcaattcct

SEQ ID NO: 72374 - DNA, 22 bp, Artificial Sequence
  chemically synthesized
cccataagctagcaattccttg

SEQ ID NO: 72375 - DNA, 22 bp, Artificial Sequence
  chemically synthesized
gcaattccttgagagaggaccc

SEQ ID NO: 72376 - DNA, 22 bp, Artificial Sequence
  chemically synthesized
cttgagagaggaccccacgtta

SEQ ID NO: 72377 - DNA, 22 bp, Artificial Sequence
  chemically synthesized
gagagaggaccccacgttactt

SEQ ID NO: 72378 - DNA, 22 bp, Artificial Sequence
  chemically synthesized
agagaggaccccacgttacttg

SEQ ID NO: 72379 - DNA, 22 bp, Artificial Sequence
  chemically synthesized
cttgcctttatccccgcacaga

SEQ ID NO: 72380 - DNA, 22 bp, Artificial Sequence
  chemically synthesized
gcctttatccccgcacagagca

SEQ ID NO: 72381 - DNA, 22 bp, Artificial Sequence
  chemically synthesized
cctttatccccgcacagagcac

SEQ ID NO: 72382 - DNA, 22 bp, Artificial Sequence
  chemically synthesized
tatccccgcacagagcacttca

SEQ ID NO: 72383 - DNA, 22 bp, Artificial Sequence
  chemically synthesized
atccccgcacagagcacttcac

SEQ ID NO: 72384 - DNA, 22 bp, Artificial Sequence
  chemically synthesized
tccccgcacagagcacttcaca

SEQ ID NO: 72385 - DNA, 22 bp, Artificial Sequence
  chemically synthesized
cacaggctgtgcaaggtaatgc

SEQ ID NO: 72386 - DNA, 22 bp, Artificial Sequence
  chemically synthesized
acaggctgtgcaaggtaatgct

SEQ ID NO: 72387 - DNA, 22 bp, Artificial Sequence
  chemically synthesized
tgcaaggtaatgctccactgag

SEQ ID NO: 72388 - DNA, 22 bp, Artificial Sequence
  chemically synthesized
cactgaggacacattctcgcct

SEQ ID NO: 72389 - DNA, 22 bp, Artificial Sequence
  chemically synthesized
aggacacattctcgcctatggg

SEQ ID NO: 72390 - DNA, 22 bp, Artificial Sequence
  chemically synthesized
tcgcctatgggaactctggagg

SEQ ID NO: 72391 - DNA, 22 bp, Artificial Sequence
  chemically synthesized
gcctatgggaactctggaggca

SEQ ID NO: 72392 - DNA, 22 bp, Artificial Sequence
  chemically synthesized
tgggaactctggaggcagggct

SEQ ID NO: 72393 - DNA, 22 bp, Artificial Sequence
  chemically synthesized
tggaggcagggctttgtggagg

SEQ ID NO: 72394 - DNA, 22 bp, Artificial Sequence
  chemically synthesized
gaggcagggctttgtggagggg

SEQ ID NO: 72395 - DNA, 22 bp, Artificial Sequence
  chemically synthesized
tgtggaggggctgccacaggct

SEQ ID NO: 72396 - DNA, 22 bp, Artificial Sequence
  chemically synthesized
gtggaggggctgccacaggctt

SEQ ID NO: 72397 - DNA, 22 bp, Artificial Sequence
  chemically synthesized
tggaggggctgccacaggctta

SEQ ID NO: 72398 - DNA, 22 bp, Artificial Sequence
  chemically synthesized
ccacaggcttatgttgcctcct

SEQ ID NO: 72399 - DNA, 22 bp, Artificial Sequence
  chemically synthesized
atgttgcctcctaggatttccc

SEQ ID NO: 72400 - DNA, 22 bp, Artificial Sequence
  chemically synthesized
tgttgcctcctaggatttccca

SEQ ID NO: 72401 - DNA, 22 bp, Artificial Sequence
  chemically synthesized
cctcctaggatttcccatgggc

SEQ ID NO: 72402 - DNA, 22 bp, Artificial Sequence
  chemically synthesized
ctaggatttcccatgggccaag

SEQ ID NO: 72403 - DNA, 22 bp, Artificial Sequence
  chemically synthesized
ggatttcccatgggccaagagg

SEQ ID NO: 72404 - DNA, 22 bp, Artificial Sequence
  chemically synthesized
cccatgggccaagagggaaaat

SEQ ID NO: 72405 - DNA, 22 bp, Artificial Sequence
  chemically synthesized
ccatgggccaagagggaaaatg

SEQ ID NO: 72406 - DNA, 22 bp, Artificial Sequence
  chemically synthesized
gggtggccatccctggtggccc

SEQ ID NO: 72407 - DNA, 22 bp, Artificial Sequence
  chemically synthesized
gtggcccctcctcatgcatcct

SEQ ID NO: 72408 - DNA, 22 bp, Artificial Sequence
  chemically synthesized
ctcatgcatcctggagagctgt

SEQ ID NO: 72409 - DNA, 22 bp, Artificial Sequence
  chemically synthesized
atgcatcctggagagctgtggg

SEQ ID NO: 72410 - DNA, 22 bp, Artificial Sequence
  chemically synthesized
gagagctgtgggcctcctctcc

SEQ ID NO: 72411 - DNA, 22 bp, Artificial Sequence
  chemically synthesized
tgggcctcctctccacaggctt

SEQ ID NO: 72412 - DNA, 22 bp, Artificial Sequence
  chemically synthesized
ctctccacaggctttgtggatc

SEQ ID NO: 72413 - DNA, 22 bp, Artificial Sequence
  chemically synthesized
tccacaggctttgtggatcttc

SEQ ID NO: 72414 - DNA, 22 bp, Artificial Sequence
  chemically synthesized
cacaggctttgtggatcttctt

SEQ ID NO: 72415 - DNA, 22 bp, Artificial Sequence
  chemically synthesized
tgtggatcttcttcagagccag

SEQ ID NO: 72416 - DNA, 22 bp, Artificial Sequence
  chemically synthesized
gtggatcttcttcagagccagt

SEQ ID NO: 72417 - DNA, 22 bp, Artificial Sequence
  chemically synthesized
tggatcttcttcagagccagtg

SEQ ID NO: 72418 - DNA, 22 bp, Artificial Sequence
  chemically synthesized
cttcagagccagtgagtcagcc

SEQ ID NO: 72419 - DNA, 22 bp, Artificial Sequence
  chemically synthesized
ttcagagccagtgagtcagcct

SEQ ID NO: 72420 - DNA, 22 bp, Artificial Sequence
  chemically synthesized
cagagccagtgagtcagccttg

SEQ ID NO: 72421 - DNA, 22 bp, Artificial Sequence
  chemically synthesized
agagccagtgagtcagccttgc

SEQ ID NO: 72422 - DNA, 22 bp, Artificial Sequence
  chemically synthesized
gctgtggtggcccacaaggagt

SEQ ID NO: 72423 - DNA, 22 bp, Artificial Sequence
  chemically synthesized
ctgtggtggcccacaaggagtg

SEQ ID NO: 72424 - DNA, 22 bp, Artificial Sequence
  chemically synthesized
tggtggcccacaaggagtggag

SEQ ID NO: 72425 - DNA, 22 bp, Artificial Sequence
  chemically synthesized
ggggacagggcaaaagctcatg

SEQ ID NO: 72426 - DNA, 22 bp, Artificial Sequence
  chemically synthesized
gggacagggcaaaagctcatgt

SEQ ID NO: 72427 - DNA, 22 bp, Artificial Sequence
  chemically synthesized
atgtgatagggatgctgtctct

SEQ ID NO: 72428 - DNA, 22 bp, Artificial Sequence
  chemically synthesized
tctctgcaaccacatggatttt

SEQ ID NO: 72429 - DNA, 22 bp, Artificial Sequence
  chemically synthesized
tgcaaccacatggattttaata

SEQ ID NO: 72430 - DNA, 22 bp, Artificial Sequence
  chemically synthesized
caaccacatggattttaatagt

SEQ ID NO: 72431 - DNA, 22 bp, Artificial Sequence
  chemically synthesized
taatagttacccatggctggct

SEQ ID NO: 72432 - DNA, 22 bp, Artificial Sequence
  chemically synthesized
aatagttacccatggctggctt

SEQ ID NO: 72433 - DNA, 22 bp, Artificial Sequence
  chemically synthesized
atagttacccatggctggcttc

SEQ ID NO: 72434 - DNA, 22 bp, Artificial Sequence
  chemically synthesized
cccatggctggcttcagctttt

SEQ ID NO: 72435 - DNA, 22 bp, Artificial Sequence
  chemically synthesized
gcttcagctttttttgtgaatg

SEQ ID NO: 72436 - DNA, 22 bp, Artificial Sequence
  chemically synthesized
cagctttttttgtgaatggcag

SEQ ID NO: 72437 - DNA, 22 bp, Artificial Sequence
  chemically synthesized
agctttttttgtgaatggcagc

SEQ ID NO: 72438 - DNA, 22 bp, Artificial Sequence
  chemically synthesized
tttttgtgaatggcagccaaaa

SEQ ID NO: 72439 - DNA, 22 bp, Artificial Sequence
  chemically synthesized
ttttgtgaatggcagccaaaaa

SEQ ID NO: 72440 - DNA, 22 bp, Artificial Sequence
  chemically synthesized
tttgtgaatggcagccaaaaag

SEQ ID NO: 72441 - DNA, 22 bp, Artificial Sequence
  chemically synthesized
ttgtgaatggcagccaaaaagt

SEQ ID NO: 72442 - DNA, 22 bp, Artificial Sequence
  chemically synthesized
tgtgaatggcagccaaaaagtg

SEQ ID NO: 72443 - DNA, 22 bp, Artificial Sequence
  chemically synthesized
gtgaatggcagccaaaaagtgt

SEQ ID NO: 72444 - DNA, 22 bp, Artificial Sequence
  chemically synthesized
tgaatggcagccaaaaagtgtg

SEQ ID NO: 72445 - DNA, 22 bp, Artificial Sequence
  chemically synthesized
agtggagacagaggggagactg

SEQ ID NO: 72446 - DNA, 22 bp, Artificial Sequence
  chemically synthesized
ttgaatttgtggagtttttagt

SEQ ID NO: 72447 - DNA, 22 bp, Artificial Sequence
  chemically synthesized
aatttgtggagtttttagttct

SEQ ID NO: 72448 - DNA, 22 bp, Artificial Sequence
  chemically synthesized
gtggagtttttagttcttccta

SEQ ID NO: 72449 - DNA, 22 bp, Artificial Sequence
  chemically synthesized
tggagtttttagttcttcctaa

SEQ ID NO: 72450 - DNA, 22 bp, Artificial Sequence
  chemically synthesized
ttagttcttcctaaacagagag

SEQ ID NO: 72451 - DNA, 22 bp, Artificial Sequence
  chemically synthesized
tagttcttcctaaacagagagc

SEQ ID NO: 72452 - DNA, 22 bp, Artificial Sequence
  chemically synthesized
agttcttcctaaacagagagca

SEQ ID NO: 72453 - DNA, 22 bp, Artificial Sequence
  chemically synthesized
gttcttcctaaacagagagcaa

SEQ ID NO: 72454 - DNA, 22 bp, Artificial Sequence
  chemically synthesized
ttcctaaacagagagcaacaga

SEQ ID NO: 72455 - DNA, 22 bp, Artificial Sequence
  chemically synthesized
cctaaacagagagcaacagaca

SEQ ID NO: 72456 - DNA, 22 bp, Artificial Sequence
  chemically synthesized
ctaaacagagagcaacagacaa

SEQ ID NO: 72457 - DNA, 22 bp, Artificial Sequence
  chemically synthesized
aacagagagcaacagacaagag

SEQ ID NO: 72458 - DNA, 22 bp, Artificial Sequence
  chemically synthesized
cagacaaattaattcttttcgt

SEQ ID NO: 72459 - DNA, 22 bp, Artificial Sequence
  chemically synthesized
attcttttcgttaatttaccct

SEQ ID NO: 72460 - DNA, 22 bp, Artificial Sequence
  chemically synthesized
ttttcgttaatttaccctcaac

SEQ ID NO: 72461 - DNA, 22 bp, Artificial Sequence
  chemically synthesized
ttcgttaatttaccctcaacta

SEQ ID NO: 72462 - DNA, 22 bp, Artificial Sequence
  chemically synthesized
tcgttaatttaccctcaactac

SEQ ID NO: 72463 - DNA, 22 bp, Artificial Sequence
  chemically synthesized
cgttaatttaccctcaactact

SEQ ID NO: 72464 - DNA, 22 bp, Artificial Sequence
  chemically synthesized
gttaatttaccctcaactactg

SEQ ID NO: 72465 - DNA, 22 bp, Artificial Sequence
  chemically synthesized
atttaccctcaactactggcca

SEQ ID NO: 72466 - DNA, 22 bp, Artificial Sequence
  chemically synthesized
accctcaactactggccaagaa

SEQ ID NO: 72467 - DNA, 22 bp, Artificial Sequence
  chemically synthesized
ccctcaactactggccaagaag

SEQ ID NO: 72468 - DNA, 22 bp, Artificial Sequence
  chemically synthesized
aactactggccaagaaggggtg

SEQ ID NO: 72469 - DNA, 22 bp, Artificial Sequence
  chemically synthesized
ctggccaagaaggggtgtaact

SEQ ID NO: 72470 - DNA, 22 bp, Artificial Sequence
  chemically synthesized
gccaagaaggggtgtaactcag

SEQ ID NO: 72471 - DNA, 22 bp, Artificial Sequence
  chemically synthesized
agaatgttttcttcttttgtgc

SEQ ID NO: 72472 - DNA, 22 bp, Artificial Sequence
  chemically synthesized
tcttcttttgtgccctgagtag

SEQ ID NO: 72473 - DNA, 22 bp, Artificial Sequence
  chemically synthesized
cttcttttgtgccctgagtagc

SEQ ID NO: 72474 - DNA, 22 bp, Artificial Sequence
  chemically synthesized
ttcttttgtgccctgagtagca

SEQ ID NO: 72475 - DNA, 22 bp, Artificial Sequence
  chemically synthesized
cttttgtgccctgagtagcaga

SEQ ID NO: 72476 - DNA, 22 bp, Artificial Sequence
  chemically synthesized
ttttgtgccctgagtagcagac

SEQ ID NO: 72477 - DNA, 22 bp, Artificial Sequence
  chemically synthesized
ttgtgccctgagtagcagaccc

SEQ ID NO: 72478 - DNA, 22 bp, Artificial Sequence
  chemically synthesized
tgtgccctgagtagcagaccca

SEQ ID NO: 72479 - DNA, 22 bp, Artificial Sequence
  chemically synthesized
gtgccctgagtagcagacccag

SEQ ID NO: 72480 - DNA, 22 bp, Artificial Sequence
  chemically synthesized
tgccctgagtagcagacccaga

SEQ ID NO: 72481 - DNA, 22 bp, Artificial Sequence
  chemically synthesized
agtagcagacccagagtctgga

SEQ ID NO: 72482 - DNA, 22 bp, Artificial Sequence
  chemically synthesized
gagacccagattctaggcctgg

SEQ ID NO: 72483 - DNA, 22 bp, Artificial Sequence
  chemically synthesized
taggcctggcttggccaacgac

SEQ ID NO: 72484 - DNA, 22 bp, Artificial Sequence
  chemically synthesized
ggcctggcttggccaacgacaa

SEQ ID NO: 72485 - DNA, 22 bp, Artificial Sequence
  chemically synthesized
gcttggccaacgacaagcaggg

SEQ ID NO: 72486 - DNA, 22 bp, Artificial Sequence
  chemically synthesized
ggccaacgacaagcagggtgac

SEQ ID NO: 72487 - DNA, 22 bp, Artificial Sequence
  chemically synthesized
gccaacgacaagcagggtgacc

SEQ ID NO: 72488 - DNA, 22 bp, Artificial Sequence
  chemically synthesized
gggttaaaaaaaaaaaaaggca

SEQ ID NO: 72489 - DNA, 22 bp, Artificial Sequence
  chemically synthesized
ggttaaaaaaaaaaaaaggcat

SEQ ID NO: 72490 - DNA, 22 bp, Artificial Sequence
  chemically synthesized
aaaaaaaaaaaaggcatcattc

SEQ ID NO: 72491 - DNA, 22 bp, Artificial Sequence
  chemically synthesized
tctgagtctcactccctcttct

SEQ ID NO: 72492 - DNA, 22 bp, Artificial Sequence
  chemically synthesized
tgagtctcactccctcttctca

SEQ ID NO: 72493 - DNA, 22 bp, Artificial Sequence
  chemically synthesized
agtctcactccctcttctcaaa

SEQ ID NO: 72494 - DNA, 22 bp, Artificial Sequence
  chemically synthesized
actccctcttctcaaaaagatg

SEQ ID NO: 72495 - DNA, 22 bp, Artificial Sequence
  chemically synthesized
cctcttctcaaaaagatggcaa

SEQ ID NO: 72496 - DNA, 22 bp, Artificial Sequence
  chemically synthesized
ttctcaaaaagatggcaattcc

SEQ ID NO: 72497 - DNA, 22 bp, Artificial Sequence
  chemically synthesized
ctcaaaaagatggcaattcctc

SEQ ID NO: 72498 - DNA, 22 bp, Artificial Sequence
  chemically synthesized
tcaaaaagatggcaattcctcc

SEQ ID NO: 72499 - DNA, 22 bp, Artificial Sequence
  chemically synthesized
aaaaagatggcaattcctcccc

SEQ ID NO: 72500 - DNA, 22 bp, Artificial Sequence
  chemically synthesized
ctcccccgctggttttccatag

SEQ ID NO: 72501 - DNA, 22 bp, Artificial Sequence
  chemically synthesized
ccccgctggttttccatagttg

SEQ ID NO: 72502 - DNA, 22 bp, Artificial Sequence
  chemically synthesized
gttttccatagttgaggtagca

SEQ ID NO: 72503 - DNA, 22 bp, Artificial Sequence
  chemically synthesized
tccatagttgaggtagcaagcc

SEQ ID NO: 72504 - DNA, 22 bp, Artificial Sequence
  chemically synthesized
ccatagttgaggtagcaagcca

SEQ ID NO: 72505 - DNA, 22 bp, Artificial Sequence
  chemically synthesized
catagttgaggtagcaagccaa

SEQ ID NO: 72506 - DNA, 22 bp, Artificial Sequence
  chemically synthesized
aggtagcaagccaatgtgttgg

SEQ ID NO: 72507 - DNA, 22 bp, Artificial Sequence
  chemically synthesized
gggtagctgaaaacgccctgtg

SEQ ID NO: 72508 - DNA, 22 bp, Artificial Sequence
  chemically synthesized
aaaacgccctgtgcatactgag

SEQ ID NO: 72509 - DNA, 22 bp, Artificial Sequence
  chemically synthesized
tgcatactgaggcttatgttcc

SEQ ID NO: 72510 - DNA, 22 bp, Artificial Sequence
  chemically synthesized
aggcttatgttccatggggggc

SEQ ID NO: 72511 - DNA, 22 bp, Artificial Sequence
  chemically synthesized
atgttccatggggggccagggg

SEQ ID NO: 72512 - DNA, 22 bp, Artificial Sequence
  chemically synthesized
tgttccatggggggccaggggc

SEQ ID NO: 72513 - DNA, 22 bp, Artificial Sequence
  chemically synthesized
catggggggccaggggccagga

SEQ ID NO: 72514 - DNA, 22 bp, Artificial Sequence
  chemically synthesized
tcatctccagctgggaggtgat

SEQ ID NO: 72515 - DNA, 22 bp, Artificial Sequence
  chemically synthesized
cagctgggaggtgatggccatg

SEQ ID NO: 72516 - DNA, 22 bp, Artificial Sequence
  chemically synthesized
ggaggtgatggccatgcctgca

SEQ ID NO: 72517 - DNA, 22 bp, Artificial Sequence
  chemically synthesized
cacccctctggccagcagaggg

SEQ ID NO: 72518 - DNA, 22 bp, Artificial Sequence
  chemically synthesized
tggccagcagagggtggtcagt

SEQ ID NO: 72519 - DNA, 22 bp, Artificial Sequence
  chemically synthesized
gccagcagagggtggtcagtag

SEQ ID NO: 72520 - DNA, 22 bp, Artificial Sequence
  chemically synthesized
ggaggccattagggcaaccttc

SEQ ID NO: 72521 - DNA, 22 bp, Artificial Sequence
  chemically synthesized
gggcaaccttctattggctcag

SEQ ID NO: 72522 - DNA, 22 bp, Artificial Sequence
  chemically synthesized
ctattggctcagactcagaatg

SEQ ID NO: 72523 - DNA, 22 bp, Artificial Sequence
  chemically synthesized
tattggctcagactcagaatgc

SEQ ID NO: 72524 - DNA, 22 bp, Artificial Sequence
  chemically synthesized
ttggctcagactcagaatgcag

SEQ ID NO: 72525 - DNA, 22 bp, Artificial Sequence
  chemically synthesized
gctcagactcagaatgcagtag

SEQ ID NO: 72526 - DNA, 22 bp, Artificial Sequence
  chemically synthesized
agactcagaatgcagtagaact

SEQ ID NO: 72527 - DNA, 22 bp, Artificial Sequence
  chemically synthesized
agaatgcagtagaacttgtgcc

SEQ ID NO: 72528 - DNA, 22 bp, Artificial Sequence
  chemically synthesized
gtgccctgtagtgttcatggac

SEQ ID NO: 72529 - DNA, 22 bp, Artificial Sequence
  chemically synthesized
tgccctgtagtgttcatggaca

SEQ ID NO: 72530 - DNA, 22 bp, Artificial Sequence
  chemically synthesized
tagtgttcatggacaggagtga

SEQ ID NO: 72531 - DNA, 22 bp, Artificial Sequence
  chemically synthesized
atggacaggagtgagaggagga

SEQ ID NO: 72532 - DNA, 22 bp, Artificial Sequence
  chemically synthesized
aggggatgtggctgtcaaggcc

SEQ ID NO: 72533 - DNA, 22 bp, Artificial Sequence
  chemically synthesized
tcaaggcctttctaggggcgat

SEQ ID NO: 72534 - DNA, 22 bp, Artificial Sequence
  chemically synthesized
tctaggggcgatgctgtctctc

SEQ ID NO: 72535 - DNA, 22 bp, Artificial Sequence
  chemically synthesized
ctaggggcgatgctgtctctcc

SEQ ID NO: 72536 - DNA, 22 bp, Artificial Sequence
  chemically synthesized
taggggcgatgctgtctctccc

SEQ ID NO: 72537 - DNA, 22 bp, Artificial Sequence
  chemically synthesized
ggggcgatgctgtctctccctc

SEQ ID NO: 72538 - DNA, 22 bp, Artificial Sequence
  chemically synthesized
tctctccctcagcatagggagt

SEQ ID NO: 72539 - DNA, 22 bp, Artificial Sequence
  chemically synthesized
tccctcagcatagggagtgggc

SEQ ID NO: 72540 - DNA, 22 bp, Artificial Sequence
  chemically synthesized
cctcagcatagggagtgggccc

SEQ ID NO: 72541 - DNA, 22 bp, Artificial Sequence
  chemically synthesized
agcatagggagtgggcccttcc

SEQ ID NO: 72542 - DNA, 22 bp, Artificial Sequence
  chemically synthesized
ccacctctggcctctctccccc

SEQ ID NO: 72543 - DNA, 22 bp, Artificial Sequence
  chemically synthesized
cacctctggcctctctccccca

SEQ ID NO: 72544 - DNA, 22 bp, Artificial Sequence
  chemically synthesized
tggcctctctcccccagggctg

SEQ ID NO: 72545 - DNA, 22 bp, Artificial Sequence
  chemically synthesized
gcctctctcccccagggctgtg

SEQ ID NO: 72546 - DNA, 22 bp, Artificial Sequence
  chemically synthesized
tctcccccagggctgtgtctgg

SEQ ID NO: 72547 - DNA, 22 bp, Artificial Sequence
  chemically synthesized
tcccccagggctgtgtctggct

SEQ ID NO: 72548 - DNA, 22 bp, Artificial Sequence
  chemically synthesized
ccccagggctgtgtctggctgt

SEQ ID NO: 72549 - DNA, 22 bp, Artificial Sequence
  chemically synthesized
tgtctggctgtccctgataaaa

SEQ ID NO: 72550 - DNA, 22 bp, Artificial Sequence
  chemically synthesized
gctgtccctgataaaactgtga

SEQ ID NO: 72551 - DNA, 22 bp, Artificial Sequence
  chemically synthesized
tccctgataaaactgtgagatg

SEQ ID NO: 72552 - DNA, 22 bp, Artificial Sequence
  chemically synthesized
ataaaactgtgagatggtgtgc

SEQ ID NO: 72553 - DNA, 22 bp, Artificial Sequence
  chemically synthesized
tgagatggtgtgcagtgtcgga

SEQ ID NO: 72554 - DNA, 22 bp, Artificial Sequence
  chemically synthesized
agtgccagagtttccgcgacca

SEQ ID NO: 72555 - DNA, 22 bp, Artificial Sequence
  chemically synthesized
ccgcgaccatatgaaaagcgtc

SEQ ID NO: 72556 - DNA, 22 bp, Artificial Sequence
  chemically synthesized
cgcgaccatatgaaaagcgtca

SEQ ID NO: 72557 - DNA, 22 bp, Artificial Sequence
  chemically synthesized
catccgatggtcccagtgttgc

SEQ ID NO: 72558 - DNA, 22 bp, Artificial Sequence
  chemically synthesized
cttgtgtgaagaaagcctccta

SEQ ID NO: 72559 - DNA, 22 bp, Artificial Sequence
  chemically synthesized
gtgtgaagaaagcctcctacct

SEQ ID NO: 72560 - DNA, 22 bp, Artificial Sequence
  chemically synthesized
tgtgaagaaagcctcctacctt

SEQ ID NO: 72561 - DNA, 22 bp, Artificial Sequence
  chemically synthesized
ctaccttgattgcatcagggcc

SEQ ID NO: 72562 - DNA, 22 bp, Artificial Sequence
  chemically synthesized
ccttgattgcatcagggccatt

SEQ ID NO: 72563 - DNA, 22 bp, Artificial Sequence
  chemically synthesized
atgcaatcaaggtaggaggctt

SEQ ID NO: 72564 - DNA, 22 bp, Artificial Sequence
  chemically synthesized
tcttcacacaagcaacactggg

SEQ ID NO: 72565 - DNA, 22 bp, Artificial Sequence
  chemically synthesized
cttcacacaagcaacactggga

SEQ ID NO: 72566 - DNA, 22 bp, Artificial Sequence
  chemically synthesized
ttcacacaagcaacactgggac

SEQ ID NO: 72567 - DNA, 22 bp, Artificial Sequence
  chemically synthesized
cacacaagcaacactgggacca

SEQ ID NO: 72568 - DNA, 22 bp, Artificial Sequence
  chemically synthesized
acacaagcaacactgggaccat

SEQ ID NO: 72569 - DNA, 22 bp, Artificial Sequence
  chemically synthesized
ggaccatcggatggaatgacgc

SEQ ID NO: 72570 - DNA, 22 bp, Artificial Sequence
  chemically synthesized
ttcatatggtcgcggaaactct

SEQ ID NO: 72571 - DNA, 22 bp, Artificial Sequence
  chemically synthesized
tcatatggtcgcggaaactctg

SEQ ID NO: 72572 - DNA, 22 bp, Artificial Sequence
  chemically synthesized
catatggtcgcggaaactctgg

SEQ ID NO: 72573 - DNA, 22 bp, Artificial Sequence
  chemically synthesized
atatggtcgcggaaactctggc

SEQ ID NO: 72574 - DNA, 22 bp, Artificial Sequence
  chemically synthesized
tggcacttagtggcctcatgct

SEQ ID NO: 72575 - DNA, 22 bp, Artificial Sequence
  chemically synthesized
gcacttagtggcctcatgctcc

SEQ ID NO: 72576 - DNA, 22 bp, Artificial Sequence
  chemically synthesized
agtggcctcatgctccgacact

SEQ ID NO: 72577 - DNA, 22 bp, Artificial Sequence
  chemically synthesized
gtggcctcatgctccgacactg

SEQ ID NO: 72578 - DNA, 22 bp, Artificial Sequence
  chemically synthesized
atgctccgacactgcacaccat

SEQ ID NO: 72579 - DNA, 22 bp, Artificial Sequence
  chemically synthesized
cgacactgcacaccatctcaca

SEQ ID NO: 72580 - DNA, 22 bp, Artificial Sequence
  chemically synthesized
cacaccatctcacagttttatc

SEQ ID NO: 72581 - DNA, 22 bp, Artificial Sequence
  chemically synthesized
acagttttatcagggacagcca

SEQ ID NO: 72582 - DNA, 22 bp, Artificial Sequence
  chemically synthesized
tatcagggacagccagacacag

SEQ ID NO: 72583 - DNA, 22 bp, Artificial Sequence
  chemically synthesized
atcagggacagccagacacagc

SEQ ID NO: 72584 - DNA, 22 bp, Artificial Sequence
  chemically synthesized
tcagggacagccagacacagcc

SEQ ID NO: 72585 - DNA, 22 bp, Artificial Sequence
  chemically synthesized
ggggagagaggccagaggtgga

SEQ ID NO: 72586 - DNA, 22 bp, Artificial Sequence
  chemically synthesized
cctatgctgagggagagacagc

SEQ ID NO: 72587 - DNA, 22 bp, Artificial Sequence
  chemically synthesized
tgctgagggagagacagcatcg

SEQ ID NO: 72588 - DNA, 22 bp, Artificial Sequence
  chemically synthesized
agggagagacagcatcgcccct

SEQ ID NO: 72589 - DNA, 22 bp, Artificial Sequence
  chemically synthesized
gaaaggccttgacagccacatc

SEQ ID NO: 72590 - DNA, 22 bp, Artificial Sequence
  chemically synthesized
gacagccacatcccctcagtcc

SEQ ID NO: 72591 - DNA, 22 bp, Artificial Sequence
  chemically synthesized
acagccacatcccctcagtcct

SEQ ID NO: 72592 - DNA, 22 bp, Artificial Sequence
  chemically synthesized
agtcctgtcctcctctcactcc

SEQ ID NO: 72593 - DNA, 22 bp, Artificial Sequence
  chemically synthesized
tcctcctctcactcctgtccat

SEQ ID NO: 72594 - DNA, 22 bp, Artificial Sequence
  chemically synthesized
ctctcactcctgtccatgaaca

SEQ ID NO: 72595 - DNA, 22 bp, Artificial Sequence
  chemically synthesized
tcactcctgtccatgaacacta

SEQ ID NO: 72596 - DNA, 22 bp, Artificial Sequence
  chemically synthesized
actcctgtccatgaacactaca

SEQ ID NO: 72597 - DNA, 22 bp, Artificial Sequence
  chemically synthesized
ctgtccatgaacactacagggc

SEQ ID NO: 72598 - DNA, 22 bp, Artificial Sequence
  chemically synthesized
tccatgaacactacagggcaca

SEQ ID NO: 72599 - DNA, 22 bp, Artificial Sequence
  chemically synthesized
cagggcacaagttctactgcat

SEQ ID NO: 72600 - DNA, 22 bp, Artificial Sequence
  chemically synthesized
tactgcattctgagtctgagcc

SEQ ID NO: 72601 - DNA, 22 bp, Artificial Sequence
  chemically synthesized
ctgcattctgagtctgagccaa

SEQ ID NO: 72602 - DNA, 22 bp, Artificial Sequence
  chemically synthesized
cattctgagtctgagccaatag

SEQ ID NO: 72603 - DNA, 22 bp, Artificial Sequence
  chemically synthesized
tgagtctgagccaatagaaggt

SEQ ID NO: 72604 - DNA, 22 bp, Artificial Sequence
  chemically synthesized
agtctgagccaatagaaggttg

SEQ ID NO: 72605 - DNA, 22 bp, Artificial Sequence
  chemically synthesized
agccaatagaaggttgccctaa

SEQ ID NO: 72606 - DNA, 22 bp, Artificial Sequence
  chemically synthesized
ccctaatggcctcccagtttcc

SEQ ID NO: 72607 - DNA, 22 bp, Artificial Sequence
  chemically synthesized
atggcctcccagtttcctactg

SEQ ID NO: 72608 - DNA, 22 bp, Artificial Sequence
  chemically synthesized
ccagtttcctactgaccaccct

SEQ ID NO: 72609 - DNA, 22 bp, Artificial Sequence
  chemically synthesized
cctactgaccaccctctgctgg

SEQ ID NO: 72610 - DNA, 22 bp, Artificial Sequence
  chemically synthesized
ctactgaccaccctctgctggc

SEQ ID NO: 72611 - DNA, 22 bp, Artificial Sequence
  chemically synthesized
ctgaccaccctctgctggccag

SEQ ID NO: 72612 - DNA, 22 bp, Artificial Sequence
  chemically synthesized
accaccctctgctggccagagg

SEQ ID NO: 72613 - DNA, 22 bp, Artificial Sequence
  chemically synthesized
tgctggccagaggggtgcaggc

SEQ ID NO: 72614 - DNA, 22 bp, Artificial Sequence
  chemically synthesized
ctggccagaggggtgcaggcat

SEQ ID NO: 72615 - DNA, 22 bp, Artificial Sequence
  chemically synthesized
gccagaggggtgcaggcatggc

SEQ ID NO: 72616 - DNA, 22 bp, Artificial Sequence
  chemically synthesized
ccagctggagatgacaatctgc

SEQ ID NO: 72617 - DNA, 22 bp, Artificial Sequence
  chemically synthesized
gagatgacaatctgctcctctg

SEQ ID NO: 72618 - DNA, 22 bp, Artificial Sequence
  chemically synthesized
ctcctctgtatccgccttgtct

SEQ ID NO: 72619 - DNA, 22 bp, Artificial Sequence
  chemically synthesized
ctctgtatccgccttgtctcct

SEQ ID NO: 72620 - DNA, 22 bp, Artificial Sequence
  chemically synthesized
tgtatccgccttgtctcctccc

SEQ ID NO: 72621 - DNA, 22 bp, Artificial Sequence
  chemically synthesized
tatccgccttgtctcctcccat

SEQ ID NO: 72622 - DNA, 22 bp, Artificial Sequence
  chemically synthesized
gtctcctcccatcactgtcctg

SEQ ID NO: 72623 - DNA, 22 bp, Artificial Sequence
  chemically synthesized
tctcctcccatcactgtcctgg

SEQ ID NO: 72624 - DNA, 22 bp, Artificial Sequence
  chemically synthesized
ctcccatcactgtcctggcccc

SEQ ID NO: 72625 - DNA, 22 bp, Artificial Sequence
  chemically synthesized
ccatcactgtcctggcccctgg

SEQ ID NO: 72626 - DNA, 22 bp, Artificial Sequence
  chemically synthesized
tcctggcccctggccccccatg

SEQ ID NO: 72627 - DNA, 22 bp, Artificial Sequence
  chemically synthesized
gcccctggccccccatggaaca

SEQ ID NO: 72628 - DNA, 22 bp, Artificial Sequence
  chemically synthesized
gccccccatggaacataagcct

SEQ ID NO: 72629 - DNA, 22 bp, Artificial Sequence
  chemically synthesized
agtatgcacagggcgttttcag

SEQ ID NO: 72630 - DNA, 22 bp, Artificial Sequence
  chemically synthesized
tcagctaccccaacacattggc

SEQ ID NO: 72631 - DNA, 22 bp, Artificial Sequence
  chemically synthesized
cagctaccccaacacattggct

SEQ ID NO: 72632 - DNA, 22 bp, Artificial Sequence
  chemically synthesized
agctaccccaacacattggctt

SEQ ID NO: 72633 - DNA, 22 bp, Artificial Sequence
  chemically synthesized
ccccaacacattggcttgctac

SEQ ID NO: 72634 - DNA, 22 bp, Artificial Sequence
  chemically synthesized
gcttgctacctcaactatggaa

SEQ ID NO: 72635 - DNA, 22 bp, Artificial Sequence
  chemically synthesized
gctacctcaactatggaaaacc

SEQ ID NO: 72636 - DNA, 22 bp, Artificial Sequence
  chemically synthesized
ctacctcaactatggaaaacca

SEQ ID NO: 72637 - DNA, 22 bp, Artificial Sequence
  chemically synthesized
cctcaactatggaaaaccagcg

SEQ ID NO: 72638 - DNA, 22 bp, Artificial Sequence
  chemically synthesized
aactatggaaaaccagcggggg

SEQ ID NO: 72639 - DNA, 22 bp, Artificial Sequence
  chemically synthesized
tggaaaaccagcgggggaggaa

SEQ ID NO: 72640 - DNA, 22 bp, Artificial Sequence
  chemically synthesized
ccatctttttgagaagagggag

SEQ ID NO: 72641 - DNA, 22 bp, Artificial Sequence
  chemically synthesized
tttgagaagagggagtgagact

SEQ ID NO: 72642 - DNA, 22 bp, Artificial Sequence
  chemically synthesized
ttgagaagagggagtgagactc

SEQ ID NO: 72643 - DNA, 22 bp, Artificial Sequence
  chemically synthesized
tgagaagagggagtgagactca

SEQ ID NO: 72644 - DNA, 22 bp, Artificial Sequence
  chemically synthesized
gagaagagggagtgagactcag

SEQ ID NO: 72645 - DNA, 22 bp, Artificial Sequence
  chemically synthesized
agaagagggagtgagactcaga

SEQ ID NO: 72646 - DNA, 22 bp, Artificial Sequence
  chemically synthesized
agagaatgatgccttttttttt

SEQ ID NO: 72647 - DNA, 22 bp, Artificial Sequence
  chemically synthesized
tttttttttttaacccaaggtc

SEQ ID NO: 72648 - DNA, 22 bp, Artificial Sequence
  chemically synthesized
ttttttttttaacccaaggtca

SEQ ID NO: 72649 - DNA, 22 bp, Artificial Sequence
  chemically synthesized
tttttttttaacccaaggtcac

SEQ ID NO: 72650 - DNA, 22 bp, Artificial Sequence
  chemically synthesized
ttttttttaacccaaggtcacc

SEQ ID NO: 72651 - DNA, 22 bp, Artificial Sequence
  chemically synthesized
tttttttaacccaaggtcaccc

SEQ ID NO: 72652 - DNA, 22 bp, Artificial Sequence
  chemically synthesized
ttttttaacccaaggtcaccct

SEQ ID NO: 72653 - DNA, 22 bp, Artificial Sequence
  chemically synthesized
tttttaacccaaggtcaccctg

SEQ ID NO: 72654 - DNA, 22 bp, Artificial Sequence
  chemically synthesized
ttttaacccaaggtcaccctgc

SEQ ID NO: 72655 - DNA, 22 bp, Artificial Sequence
  chemically synthesized
tttaacccaaggtcaccctgct

SEQ ID NO: 72656 - DNA, 22 bp, Artificial Sequence
  chemically synthesized
ttaacccaaggtcaccctgctt

SEQ ID NO: 72657 - DNA, 22 bp, Artificial Sequence
  chemically synthesized
taacccaaggtcaccctgcttg

SEQ ID NO: 72658 - DNA, 22 bp, Artificial Sequence
  chemically synthesized
aacccaaggtcaccctgcttgt

SEQ ID NO: 72659 - DNA, 22 bp, Artificial Sequence
  chemically synthesized
acccaaggtcaccctgcttgtc

SEQ ID NO: 72660 - DNA, 22 bp, Artificial Sequence
  chemically synthesized
cttgtcgttggccaagccaggc

SEQ ID NO: 72661 - DNA, 22 bp, Artificial Sequence
  chemically synthesized
gtcgttggccaagccaggccta

SEQ ID NO: 72662 - DNA, 22 bp, Artificial Sequence
  chemically synthesized
tcgttggccaagccaggcctag

SEQ ID NO: 72663 - DNA, 22 bp, Artificial Sequence
  chemically synthesized
gccaagccaggcctagaatctg

SEQ ID NO: 72664 - DNA, 22 bp, Artificial Sequence
  chemically synthesized
gaatctgggtctccagactctg

SEQ ID NO: 72665 - DNA, 22 bp, Artificial Sequence
  chemically synthesized
ggtctccagactctgggtctgc

SEQ ID NO: 72666 - DNA, 22 bp, Artificial Sequence
  chemically synthesized
cagactctgggtctgctactca

SEQ ID NO: 72667 - DNA, 22 bp, Artificial Sequence
  chemically synthesized
tgggtctgctactcagggcaca

SEQ ID NO: 72668 - DNA, 22 bp, Artificial Sequence
  chemically synthesized
ggtctgctactcagggcacaaa

SEQ ID NO: 72669 - DNA, 22 bp, Artificial Sequence
  chemically synthesized
ctactcagggcacaaaagaaga

SEQ ID NO: 72670 - DNA, 22 bp, Artificial Sequence
  chemically synthesized
ctcagggcacaaaagaagaaaa

SEQ ID NO: 72671 - DNA, 22 bp, Artificial Sequence
  chemically synthesized
agggcacaaaagaagaaaacat

SEQ ID NO: 72672 - DNA, 22 bp, Artificial Sequence
  chemically synthesized
tgagttacaccccttcttggcc

SEQ ID NO: 72673 - DNA, 22 bp, Artificial Sequence
  chemically synthesized
agttacaccccttcttggccag

SEQ ID NO: 72674 - DNA, 22 bp, Artificial Sequence
  chemically synthesized
caccccttcttggccagtagtt

SEQ ID NO: 72675 - DNA, 22 bp, Artificial Sequence
  chemically synthesized
cttggccagtagttgagggtaa

SEQ ID NO: 72676 - DNA, 22 bp, Artificial Sequence
  chemically synthesized
ttggccagtagttgagggtaaa

SEQ ID NO: 72677 - DNA, 22 bp, Artificial Sequence
  chemically synthesized
ggccagtagttgagggtaaatt

SEQ ID NO: 72678 - DNA, 22 bp, Artificial Sequence
  chemically synthesized
gccagtagttgagggtaaatta

SEQ ID NO: 72679 - DNA, 22 bp, Artificial Sequence
  chemically synthesized
agggtaaattaacgaaaagaat

SEQ ID NO: 72680 - DNA, 22 bp, Artificial Sequence
  chemically synthesized
acgaaaagaattaatttgtctg

SEQ ID NO: 72681 - DNA, 22 bp, Artificial Sequence
  chemically synthesized
atttgtctgtaactcttgtctg

SEQ ID NO: 72682 - DNA, 22 bp, Artificial Sequence
  chemically synthesized
gtctgtaactcttgtctgttgc

SEQ ID NO: 72683 - DNA, 22 bp, Artificial Sequence
  chemically synthesized
tctgtaactcttgtctgttgct

SEQ ID NO: 72684 - DNA, 22 bp, Artificial Sequence
  chemically synthesized
taactcttgtctgttgctctct

SEQ ID NO: 72685 - DNA, 22 bp, Artificial Sequence
  chemically synthesized
ttgtctgttgctctctgtttag

SEQ ID NO: 72686 - DNA, 22 bp, Artificial Sequence
  chemically synthesized
gtctgttgctctctgtttagga

SEQ ID NO: 72687 - DNA, 22 bp, Artificial Sequence
  chemically synthesized
tctgttgctctctgtttaggaa

SEQ ID NO: 72688 - DNA, 22 bp, Artificial Sequence
  chemically synthesized
ttgctctctgtttaggaagaac

SEQ ID NO: 72689 - DNA, 22 bp, Artificial Sequence
  chemically synthesized
ctctctgtttaggaagaactaa

SEQ ID NO: 72690 - DNA, 22 bp, Artificial Sequence
  chemically synthesized
tctgtttaggaagaactaaaaa

SEQ ID NO: 72691 - DNA, 22 bp, Artificial Sequence
  chemically synthesized
tgtttaggaagaactaaaaact

SEQ ID NO: 72692 - DNA, 22 bp, Artificial Sequence
  chemically synthesized
tttaggaagaactaaaaactcc

SEQ ID NO: 72693 - DNA, 22 bp, Artificial Sequence
  chemically synthesized
aggaagaactaaaaactccaca

SEQ ID NO: 72694 - DNA, 22 bp, Artificial Sequence
  chemically synthesized
ggaagaactaaaaactccacaa

SEQ ID NO: 72695 - DNA, 22 bp, Artificial Sequence
  chemically synthesized
aaaactccacaaattcaacagt

SEQ ID NO: 72696 - DNA, 22 bp, Artificial Sequence
  chemically synthesized
cacaaattcaacagtctcccct

SEQ ID NO: 72697 - DNA, 22 bp, Artificial Sequence
  chemically synthesized
aacagtctcccctctgtctcca

SEQ ID NO: 72698 - DNA, 22 bp, Artificial Sequence
  chemically synthesized
ccctctgtctccactgaactat

SEQ ID NO: 72699 - DNA, 22 bp, Artificial Sequence
  chemically synthesized
tgtctccactgaactatccctc

SEQ ID NO: 72700 - DNA, 22 bp, Artificial Sequence
  chemically synthesized
tctccactgaactatccctcca

SEQ ID NO: 72701 - DNA, 22 bp, Artificial Sequence
  chemically synthesized
cactgaactatccctccatttt

SEQ ID NO: 72702 - DNA, 22 bp, Artificial Sequence
  chemically synthesized
aactatccctccattttcacca

SEQ ID NO: 72703 - DNA, 22 bp, Artificial Sequence
  chemically synthesized
tccctccattttcaccacactt

SEQ ID NO: 72704 - DNA, 22 bp, Artificial Sequence
  chemically synthesized
cattttcaccacactttttggc

SEQ ID NO: 72705 - DNA, 22 bp, Artificial Sequence
  chemically synthesized
tcaccacactttttggctgcca

SEQ ID NO: 72706 - DNA, 22 bp, Artificial Sequence
  chemically synthesized
caccacactttttggctgccat

SEQ ID NO: 72707 - DNA, 22 bp, Artificial Sequence
  chemically synthesized
accacactttttggctgccatt

SEQ ID NO: 72708 - DNA, 22 bp, Artificial Sequence
  chemically synthesized
tttggctgccattcacaaaaaa

SEQ ID NO: 72709 - DNA, 22 bp, Artificial Sequence
  chemically synthesized
ttggctgccattcacaaaaaaa

SEQ ID NO: 72710 - DNA, 22 bp, Artificial Sequence
  chemically synthesized
tggctgccattcacaaaaaaag

SEQ ID NO: 72711 - DNA, 22 bp, Artificial Sequence
  chemically synthesized
ggctgccattcacaaaaaaagc

SEQ ID NO: 72712 - DNA, 22 bp, Artificial Sequence
  chemically synthesized
gctgccattcacaaaaaaagct

SEQ ID NO: 72713 - DNA, 22 bp, Artificial Sequence
  chemically synthesized
ccattcacaaaaaaagctgaag

SEQ ID NO: 72714 - DNA, 22 bp, Artificial Sequence
  chemically synthesized
acaaaaaaagctgaagccagcc

SEQ ID NO: 72715 - DNA, 22 bp, Artificial Sequence
  chemically synthesized
aagccagccatgggtaactatt

SEQ ID NO: 72716 - DNA, 22 bp, Artificial Sequence
  chemically synthesized
ttaaaatccatgtggttgcaga

SEQ ID NO: 72717 - DNA, 22 bp, Artificial Sequence
  chemically synthesized
aaatccatgtggttgcagagac

SEQ ID NO: 72718 - DNA, 22 bp, Artificial Sequence
  chemically synthesized
cagagacagcatccctatcaca

SEQ ID NO: 72719 - DNA, 22 bp, Artificial Sequence
  chemically synthesized
tcacatgagcttttgccctgtc

SEQ ID NO: 72720 - DNA, 22 bp, Artificial Sequence
  chemically synthesized
ttgccctgtccccaaggccctc

SEQ ID NO: 72721 - DNA, 22 bp, Artificial Sequence
  chemically synthesized
tgccctgtccccaaggccctct

SEQ ID NO: 72722 - DNA, 22 bp, Artificial Sequence
  chemically synthesized
gccctgtccccaaggccctctg

SEQ ID NO: 72723 - DNA, 22 bp, Artificial Sequence
  chemically synthesized
ccctgtccccaaggccctctgt

SEQ ID NO: 72724 - DNA, 22 bp, Artificial Sequence
  chemically synthesized
tccccaaggccctctgtcatct

SEQ ID NO: 72725 - DNA, 22 bp, Artificial Sequence
  chemically synthesized
tgtcatctccactccttgtggg

SEQ ID NO: 72726 - DNA, 22 bp, Artificial Sequence
  chemically synthesized
tcatctccactccttgtgggcc

SEQ ID NO: 72727 - DNA, 22 bp, Artificial Sequence
  chemically synthesized
cactccttgtgggccaccacag

SEQ ID NO: 72728 - DNA, 22 bp, Artificial Sequence
  chemically synthesized
cttgtgggccaccacagcaagg

SEQ ID NO: 72729 - DNA, 22 bp, Artificial Sequence
  chemically synthesized
gtgggccaccacagcaaggctg

SEQ ID NO: 72730 - DNA, 22 bp, Artificial Sequence
  chemically synthesized
tgggccaccacagcaaggctga

SEQ ID NO: 72731 - DNA, 22 bp, Artificial Sequence
  chemically synthesized
actcactggctctgaagaagat

SEQ ID NO: 72732 - DNA, 22 bp, Artificial Sequence
  chemically synthesized
actggctctgaagaagatccac

SEQ ID NO: 72733 - DNA, 22 bp, Artificial Sequence
  chemically synthesized
gctctgaagaagatccacaaag

SEQ ID NO: 72734 - DNA, 22 bp, Artificial Sequence
  chemically synthesized
tgaagaagatccacaaagcctg

SEQ ID NO: 72735 - DNA, 22 bp, Artificial Sequence
  chemically synthesized
aagaagatccacaaagcctgtg

SEQ ID NO: 72736 - DNA, 22 bp, Artificial Sequence
  chemically synthesized
tggagaggaggcccacagctct

SEQ ID NO: 72737 - DNA, 22 bp, Artificial Sequence
  chemically synthesized
tccaggatgcatgaggaggggc

SEQ ID NO: 72738 - DNA, 22 bp, Artificial Sequence
  chemically synthesized
caggatgcatgaggaggggcca

SEQ ID NO: 72739 - DNA, 22 bp, Artificial Sequence
  chemically synthesized
tccctcttggcccatgggaaat

SEQ ID NO: 72740 - DNA, 22 bp, Artificial Sequence
  chemically synthesized
ccctcttggcccatgggaaatc

SEQ ID NO: 72741 - DNA, 22 bp, Artificial Sequence
  chemically synthesized
cctcttggcccatgggaaatcc

SEQ ID NO: 72742 - DNA, 22 bp, Artificial Sequence
  chemically synthesized
ttggcccatgggaaatcctagg

SEQ ID NO: 72743 - DNA, 22 bp, Artificial Sequence
  chemically synthesized
ggcccatgggaaatcctaggag

SEQ ID NO: 72744 - DNA, 22 bp, Artificial Sequence
  chemically synthesized
gcccatgggaaatcctaggagg

SEQ ID NO: 72745 - DNA, 22 bp, Artificial Sequence
  chemically synthesized
ggaggcaacataagcctgtggc

SEQ ID NO: 72746 - DNA, 22 bp, Artificial Sequence
  chemically synthesized
tggcagcccctccacaaagccc

SEQ ID NO: 72747 - DNA, 22 bp, Artificial Sequence
  chemically synthesized
cacaaagccctgcctccagagt

SEQ ID NO: 72748 - DNA, 22 bp, Artificial Sequence
  chemically synthesized
cctccagagttcccataggcga

SEQ ID NO: 72749 - DNA, 22 bp, Artificial Sequence
  chemically synthesized
cagagttcccataggcgagaat

SEQ ID NO: 72750 - DNA, 22 bp, Artificial Sequence
  chemically synthesized
ccataggcgagaatgtgtcctc

SEQ ID NO: 72751 - DNA, 22 bp, Artificial Sequence
  chemically synthesized
agtggagcattaccttgcacag

SEQ ID NO: 72752 - DNA, 22 bp, Artificial Sequence
  chemically synthesized
ccttgcacagcctgtgaagtgc

SEQ ID NO: 72753 - DNA, 22 bp, Artificial Sequence
  chemically synthesized
gcacagcctgtgaagtgctctg

SEQ ID NO: 72754 - DNA, 22 bp, Artificial Sequence
  chemically synthesized
cacagcctgtgaagtgctctgt

SEQ ID NO: 72755 - DNA, 22 bp, Artificial Sequence
  chemically synthesized
tgaagtgctctgtgcggggata

SEQ ID NO: 72756 - DNA, 22 bp, Artificial Sequence
  chemically synthesized
tgtgcggggataaaggcaagta

SEQ ID NO: 72757 - DNA, 22 bp, Artificial Sequence
  chemically synthesized
tgcggggataaaggcaagtaac

SEQ ID NO: 72758 - DNA, 22 bp, Artificial Sequence
  chemically synthesized
tctcaaggaattgctagcttat

SEQ ID NO: 72759 - DNA, 22 bp, Artificial Sequence
  chemically synthesized
tcaaggaattgctagcttatgg

SEQ ID NO: 72760 - DNA, 22 bp, Artificial Sequence
  chemically synthesized
aaggaattgctagcttatgggg

SEQ ID NO: 72761 - DNA, 22 bp, Artificial Sequence
  chemically synthesized
ctagcttatggggagagaaaac

SEQ ID NO: 72762 - DNA, 22 bp, Artificial Sequence
  chemically synthesized
gcttatggggagagaaaactaa

SEQ ID NO: 72763 - DNA, 22 bp, Artificial Sequence
  chemically synthesized
atggggagagaaaactaaacgt

SEQ ID NO: 72764 - DNA, 22 bp, Artificial Sequence
  chemically synthesized
tggggagagaaaactaaacgtg

SEQ ID NO: 72765 - DNA, 22 bp, Artificial Sequence
  chemically synthesized
aacgtggaagccccaacagtgt

SEQ ID NO: 72766 - DNA, 22 bp, Artificial Sequence
  chemically synthesized
gagtatgaagggggccccacct

SEQ ID NO: 72767 - DNA, 22 bp, Artificial Sequence
  chemically synthesized
aggaggtcggggagtgtggcgt

SEQ ID NO: 72768 - DNA, 22 bp, Artificial Sequence
  chemically synthesized
ccccatagcaggatgtgtgcaa

SEQ ID NO: 72769 - DNA, 22 bp, Artificial Sequence
  chemically synthesized
ccactggtactcagcatctgcc

SEQ ID NO: 72770 - DNA, 22 bp, Artificial Sequence
  chemically synthesized
gtactcagcatctgccacctcg

SEQ ID NO: 72771 - DNA, 22 bp, Artificial Sequence
  chemically synthesized
agcatctgccacctcgctgacc

SEQ ID NO: 72772 - DNA, 22 bp, Artificial Sequence
  chemically synthesized
ccacctcgctgaccctcatttg

SEQ ID NO: 72773 - DNA, 22 bp, Artificial Sequence
  chemically synthesized
gctgaccctcatttgaccctcc

SEQ ID NO: 72774 - DNA, 22 bp, Artificial Sequence
  chemically synthesized
accctcatttgaccctcccagg

SEQ ID NO: 72775 - DNA, 22 bp, Artificial Sequence
  chemically synthesized
atttgaccctcccaggcaagtg

SEQ ID NO: 72776 - DNA, 22 bp, Artificial Sequence
  chemically synthesized
gaccctcccaggcaagtgctgt

SEQ ID NO: 72777 - DNA, 22 bp, Artificial Sequence
  chemically synthesized
accctcccaggcaagtgctgtg

SEQ ID NO: 72778 - DNA, 22 bp, Artificial Sequence
  chemically synthesized
ccaggcaagtgctgtgatgacc

SEQ ID NO: 72779 - DNA, 22 bp, Artificial Sequence
  chemically synthesized
tgatgaccccctccctggtgag

SEQ ID NO: 72780 - DNA, 22 bp, Artificial Sequence
  chemically synthesized
cctggtgaggagccggccagga

SEQ ID NO: 72781 - DNA, 22 bp, Artificial Sequence
  chemically synthesized
gtgaggagccggccaggacttg

SEQ ID NO: 72782 - DNA, 22 bp, Artificial Sequence
  chemically synthesized
ggatccaagaagtctggcttca

SEQ ID NO: 72783 - DNA, 22 bp, Artificial Sequence
  chemically synthesized
gatccaagaagtctggcttcaa

SEQ ID NO: 72784 - DNA, 22 bp, Artificial Sequence
  chemically synthesized
gcttcaaaccccatgctctgac

SEQ ID NO: 72785 - DNA, 22 bp, Artificial Sequence
  chemically synthesized
caaaccccatgctctgaccgct

SEQ ID NO: 72786 - DNA, 22 bp, Artificial Sequence
  chemically synthesized
aaaccccatgctctgaccgctc

SEQ ID NO: 72787 - DNA, 22 bp, Artificial Sequence
  chemically synthesized
tgaccgctcgatggcaccgctt

SEQ ID NO: 72788 - DNA, 22 bp, Artificial Sequence
  chemically synthesized
accgctcgatggcaccgcttcc

SEQ ID NO: 72789 - DNA, 22 bp, Artificial Sequence
  chemically synthesized
gatggcaccgcttccttggcag

SEQ ID NO: 72790 - DNA, 22 bp, Artificial Sequence
  chemically synthesized
ccttggcaggacatctacagct

SEQ ID NO: 72791 - DNA, 22 bp, Artificial Sequence
  chemically synthesized
cttggcaggacatctacagctc

SEQ ID NO: 72792 - DNA, 22 bp, Artificial Sequence
  chemically synthesized
ggcaggacatctacagctccca

SEQ ID NO: 72793 - DNA, 22 bp, Artificial Sequence
  chemically synthesized
gcaggacatctacagctcccag

SEQ ID NO: 72794 - DNA, 22 bp, Artificial Sequence
  chemically synthesized
cagctcccagggcacccagggg

SEQ ID NO: 72795 - DNA, 22 bp, Artificial Sequence
  chemically synthesized
ccagggcacccaggggacatca

SEQ ID NO: 72796 - DNA, 22 bp, Artificial Sequence
  chemically synthesized
tgaaaggggaatggtcagaccc

SEQ ID NO: 72797 - DNA, 22 bp, Artificial Sequence
  chemically synthesized
aaaggggaatggtcagacccgg

SEQ ID NO: 72798 - DNA, 22 bp, Artificial Sequence
  chemically synthesized
gaatgccatgctaaggagttcg

SEQ ID NO: 72799 - DNA, 22 bp, Artificial Sequence
  chemically synthesized
aatgccatgctaaggagttcgg

SEQ ID NO: 72800 - DNA, 22 bp, Artificial Sequence
  chemically synthesized
aggagttcggacttgacaagag

SEQ ID NO: 72801 - DNA, 22 bp, Artificial Sequence
  chemically synthesized
ggacttgacaagaggcagcagc

SEQ ID NO: 72802 - DNA, 22 bp, Artificial Sequence
  chemically synthesized
gacaagaggcagcagcaaaggg

SEQ ID NO: 72803 - DNA, 22 bp, Artificial Sequence
  chemically synthesized
acaagaggcagcagcaaagggt

SEQ ID NO: 72804 - DNA, 22 bp, Artificial Sequence
  chemically synthesized
tgataacctggttagacgtgct

SEQ ID NO: 72805 - DNA, 22 bp, Artificial Sequence
  chemically synthesized
gataacctggttagacgtgctc

SEQ ID NO: 72806 - DNA, 22 bp, Artificial Sequence
  chemically synthesized
ataacctggttagacgtgctct

SEQ ID NO: 72807 - DNA, 22 bp, Artificial Sequence
  chemically synthesized
gttagacgtgctctgatttatt

SEQ ID NO: 72808 - DNA, 22 bp, Artificial Sequence
  chemically synthesized
gacgtgctctgatttattgtat

SEQ ID NO: 72809 - DNA, 22 bp, Artificial Sequence
  chemically synthesized
tgatttattgtatttcactgct

SEQ ID NO: 72810 - DNA, 22 bp, Artificial Sequence
  chemically synthesized
atttattgtatttcactgctgc

SEQ ID NO: 72811 - DNA, 22 bp, Artificial Sequence
  chemically synthesized
attgtatttcactgctgcaaga

SEQ ID NO: 72812 - DNA, 22 bp, Artificial Sequence
  chemically synthesized
ttgtatttcactgctgcaagat

SEQ ID NO: 72813 - DNA, 22 bp, Artificial Sequence
  chemically synthesized
tatttcactgctgcaagattta

SEQ ID NO: 72814 - DNA, 22 bp, Artificial Sequence
  chemically synthesized
cactgctgcaagatttactgga

SEQ ID NO: 72815 - DNA, 22 bp, Artificial Sequence
  chemically synthesized
actgctgcaagatttactggac

SEQ ID NO: 72816 - DNA, 22 bp, Artificial Sequence
  chemically synthesized
ctgcaagatttactggacaaag

SEQ ID NO: 72817 - DNA, 22 bp, Artificial Sequence
  chemically synthesized
caagatttactggacaaagagg

SEQ ID NO: 72818 - DNA, 22 bp, Artificial Sequence
  chemically synthesized
actggacaaagaggaggagggg

SEQ ID NO: 72819 - DNA, 22 bp, Artificial Sequence
  chemically synthesized
ctggacaaagaggaggaggggg

SEQ ID NO: 72820 - DNA, 22 bp, Artificial Sequence
  chemically synthesized
gacaaagaggaggagggggaga

SEQ ID NO: 72821 - DNA, 22 bp, Artificial Sequence
  chemically synthesized
gaagcccaagcaaaggccaggg

SEQ ID NO: 72822 - DNA, 22 bp, Artificial Sequence
  chemically synthesized
ccagcctgagcgcggagtgcat

SEQ ID NO: 72823 - DNA, 22 bp, Artificial Sequence
  chemically synthesized
cagcctgagcgcggagtgcatg

SEQ ID NO: 72824 - DNA, 22 bp, Artificial Sequence
  chemically synthesized
agcgcggagtgcatgcaggctg

SEQ ID NO: 72825 - DNA, 22 bp, Artificial Sequence
  chemically synthesized
cgcggtggccgcccgggttgca

SEQ ID NO: 72826 - DNA, 22 bp, Artificial Sequence
  chemically synthesized
cagggaacgcgcgggccagcga

SEQ ID NO: 72827 - DNA, 22 bp, Artificial Sequence
  chemically synthesized
tgcggtgctaccccgtgcccgc

SEQ ID NO: 72828 - DNA, 22 bp, Artificial Sequence
  chemically synthesized
cggtgctaccccgtgcccgcac

SEQ ID NO: 72829 - DNA, 22 bp, Artificial Sequence
  chemically synthesized
ccccgtgcccgcactcacccag

SEQ ID NO: 72830 - DNA, 22 bp, Artificial Sequence
  chemically synthesized
acccaggacggcgcagaccagc

SEQ ID NO: 72831 - DNA, 22 bp, Artificial Sequence
  chemically synthesized
ccacggcgagcctcatcttccg

SEQ ID NO: 72832 - DNA, 22 bp, Artificial Sequence
  chemically synthesized
atcttccgggtgcggcgctgag

SEQ ID NO: 72833 - DNA, 22 bp, Artificial Sequence
  chemically synthesized
ccgggtgcggcgctgagcagcg

SEQ ID NO: 72834 - DNA, 22 bp, Artificial Sequence
  chemically synthesized
cgggtgcggcgctgagcagcga

SEQ ID NO: 72835 - DNA, 22 bp, Artificial Sequence
  chemically synthesized
agcagcgagcacagtcggactc

SEQ ID NO: 72836 - DNA, 22 bp, Artificial Sequence
  chemically synthesized
gcttctgtgcagcctccggcgc

SEQ ID NO: 72837 - DNA, 22 bp, Artificial Sequence
  chemically synthesized
ctgtgcagcctccggcgccccg

SEQ ID NO: 72838 - DNA, 22 bp, Artificial Sequence
  chemically synthesized
tgtgcagcctccggcgccccgc

SEQ ID NO: 72839 - DNA, 22 bp, Artificial Sequence
  chemically synthesized
tgcagcctccggcgccccgcgt

SEQ ID NO: 72840 - DNA, 22 bp, Artificial Sequence
  chemically synthesized
cggcgccccgcgtccctttatt

SEQ ID NO: 72841 - DNA, 22 bp, Artificial Sequence
  chemically synthesized
tattccattcccggcctgggcg

SEQ ID NO: 72842 - DNA, 22 bp, Artificial Sequence
  chemically synthesized
attccattcccggcctgggcgg

SEQ ID NO: 72843 - DNA, 22 bp, Artificial Sequence
  chemically synthesized
ttccattcccggcctgggcggg

SEQ ID NO: 72844 - DNA, 22 bp, Artificial Sequence
  chemically synthesized
cattcccggcctgggcgggctg

SEQ ID NO: 72845 - DNA, 22 bp, Artificial Sequence
  chemically synthesized
ccggcctgggcgggctgggcgc

SEQ ID NO: 72846 - DNA, 22 bp, Artificial Sequence
  chemically synthesized
ggcgggctgggcgcaatctttg

SEQ ID NO: 72847 - DNA, 22 bp, Artificial Sequence
  chemically synthesized
ggcgcaatctttgacctcccgt

SEQ ID NO: 72848 - DNA, 22 bp, Artificial Sequence
  chemically synthesized
tgacctcccgtgtttgtgcagc

SEQ ID NO: 72849 - DNA, 22 bp, Artificial Sequence
  chemically synthesized
gacctcccgtgtttgtgcagcc

SEQ ID NO: 72850 - DNA, 22 bp, Artificial Sequence
  chemically synthesized
acctcccgtgtttgtgcagccg

SEQ ID NO: 72851 - DNA, 22 bp, Artificial Sequence
  chemically synthesized
ccgtgtttgtgcagccgggttg

SEQ ID NO: 72852 - DNA, 22 bp, Artificial Sequence
  chemically synthesized
gtgcagccgggttgcccaatcg

SEQ ID NO: 72853 - DNA, 22 bp, Artificial Sequence
  chemically synthesized
tgcagccgggttgcccaatcgc

SEQ ID NO: 72854 - DNA, 22 bp, Artificial Sequence
  chemically synthesized
cccaatcgcccctctcccaacc

SEQ ID NO: 72855 - DNA, 22 bp, Artificial Sequence
  chemically synthesized
tcccaaccccccttccttactc

SEQ ID NO: 72856 - DNA, 22 bp, Artificial Sequence
  chemically synthesized
ccaaccccccttccttactcgt

SEQ ID NO: 72857 - DNA, 22 bp, Artificial Sequence
  chemically synthesized
ccttactcgtcccactgatcac

SEQ ID NO: 72858 - DNA, 22 bp, Artificial Sequence
  chemically synthesized
cttactcgtcccactgatcacc

SEQ ID NO: 72859 - DNA, 22 bp, Artificial Sequence
  chemically synthesized
actcgtcccactgatcacctca

SEQ ID NO: 72860 - DNA, 22 bp, Artificial Sequence
  chemically synthesized
ctcgtcccactgatcacctcat

SEQ ID NO: 72861 - DNA, 22 bp, Artificial Sequence
  chemically synthesized
gtcccactgatcacctcatttt

SEQ ID NO: 72862 - DNA, 22 bp, Artificial Sequence
  chemically synthesized
atcacctcattttctgagctct

SEQ ID NO: 72863 - DNA, 22 bp, Artificial Sequence
  chemically synthesized
attttctgagctctggagacga

SEQ ID NO: 72864 - DNA, 22 bp, Artificial Sequence
  chemically synthesized
tctgagctctggagacgacccg

SEQ ID NO: 72865 - DNA, 22 bp, Artificial Sequence
  chemically synthesized
ctgagctctggagacgacccgc

SEQ ID NO: 72866 - DNA, 22 bp, Artificial Sequence
  chemically synthesized
tgagctctggagacgacccgcg

SEQ ID NO: 72867 - DNA, 22 bp, Artificial Sequence
  chemically synthesized
agctctggagacgacccgcgag

SEQ ID NO: 72868 - DNA, 22 bp, Artificial Sequence
  chemically synthesized
tggagacgacccgcgagtggaa

SEQ ID NO: 72869 - DNA, 22 bp, Artificial Sequence
  chemically synthesized
gagacgacccgcgagtggaagg

SEQ ID NO: 72870 - DNA, 22 bp, Artificial Sequence
  chemically synthesized
atgggaagggacatgaagcaca

SEQ ID NO: 72871 - DNA, 22 bp, Artificial Sequence
  chemically synthesized
tcatcgcggctcgctcggtgcc

SEQ ID NO: 72872 - DNA, 20 bp, Artificial Sequence
  chemically synthesized
actaagtcaataatcagaat

SEQ ID NO: 72873 - DNA, 20 bp, Artificial Sequence
  chemically synthesized
aagtcaataatcagaatcag

SEQ ID NO: 72874 - DNA, 20 bp, Artificial Sequence
  chemically synthesized
agtcaataatcagaatcagc

SEQ ID NO: 72875 - DNA, 20 bp, Artificial Sequence
  chemically synthesized
aatcagaatcagcaggtttg

SEQ ID NO: 72876 - DNA, 20 bp, Artificial Sequence
  chemically synthesized
agaatcagcaggtttgcagt

SEQ ID NO: 72877 - DNA, 20 bp, Artificial Sequence
  chemically synthesized
cagcaggtttgcagtcagat

SEQ ID NO: 72878 - DNA, 20 bp, Artificial Sequence
  chemically synthesized
caggtttgcagtcagattgg

SEQ ID NO: 72879 - DNA, 20 bp, Artificial Sequence
  chemically synthesized
aggtttgcagtcagattggc

SEQ ID NO: 72880 - DNA, 20 bp, Artificial Sequence
  chemically synthesized
ggtttgcagtcagattggca

SEQ ID NO: 72881 - DNA, 20 bp, Artificial Sequence
  chemically synthesized
gcagtcagattggcagggat

SEQ ID NO: 72882 - DNA, 20 bp, Artificial Sequence
  chemically synthesized
gtcagattggcagggataag

SEQ ID NO: 72883 - DNA, 20 bp, Artificial Sequence
  chemically synthesized
attggcagggataagcagcc

SEQ ID NO: 72884 - DNA, 20 bp, Artificial Sequence
  chemically synthesized
cagggataagcagcctagct

SEQ ID NO: 72885 - DNA, 20 bp, Artificial Sequence
  chemically synthesized
agggataagcagcctagctc

SEQ ID NO: 72886 - DNA, 20 bp, Artificial Sequence
  chemically synthesized
ggataagcagcctagctcag

SEQ ID NO: 72887 - DNA, 20 bp, Artificial Sequence
  chemically synthesized
taagcagcctagctcaggag

SEQ ID NO: 72888 - DNA, 20 bp, Artificial Sequence
  chemically synthesized
cagcctagctcaggagaagt

SEQ ID NO: 72889 - DNA, 20 bp, Artificial Sequence
  chemically synthesized
ctcaggagaagtgagtataa

SEQ ID NO: 72890 - DNA, 20 bp, Artificial Sequence
  chemically synthesized
agaagtgagtataaaagccc

SEQ ID NO: 72891 - DNA, 20 bp, Artificial Sequence
  chemically synthesized
gaagtgagtataaaagcccc

SEQ ID NO: 72892 - DNA, 20 bp, Artificial Sequence
  chemically synthesized
tgagtataaaagccccaggc

SEQ ID NO: 72893 - DNA, 20 bp, Artificial Sequence
  chemically synthesized
gagtataaaagccccaggct

SEQ ID NO: 72894 - DNA, 20 bp, Artificial Sequence
  chemically synthesized
gtataaaagccccaggctgg

SEQ ID NO: 72895 - DNA, 20 bp, Artificial Sequence
  chemically synthesized
taaaagccccaggctgggag

SEQ ID NO: 72896 - DNA, 20 bp, Artificial Sequence
  chemically synthesized
caggctgggagcagccatca

SEQ ID NO: 72897 - DNA, 20 bp, Artificial Sequence
  chemically synthesized
gctgggagcagccatcacag

SEQ ID NO: 72898 - DNA, 20 bp, Artificial Sequence
  chemically synthesized
cacagaagtccactcattct

SEQ ID NO: 72899 - DNA, 20 bp, Artificial Sequence
  chemically synthesized
agaagtccactcattcttgg

SEQ ID NO: 72900 - DNA, 20 bp, Artificial Sequence
  chemically synthesized
gaagtccactcattcttggc

SEQ ID NO: 72901 - DNA, 20 bp, Artificial Sequence
  chemically synthesized
tccactcattcttggcagga

SEQ ID NO: 72902 - DNA, 20 bp, Artificial Sequence
  chemically synthesized
ctgctcctcctctgccttgc

SEQ ID NO: 72903 - DNA, 20 bp, Artificial Sequence
  chemically synthesized
cctcctctgccttgctggac

SEQ ID NO: 72904 - DNA, 20 bp, Artificial Sequence
  chemically synthesized
ctggactggtatttgtgtct

SEQ ID NO: 72905 - DNA, 20 bp, Artificial Sequence
  chemically synthesized
tggactggtatttgtgtctg

SEQ ID NO: 72906 - DNA, 20 bp, Artificial Sequence
  chemically synthesized
ctggtatttgtgtctgaggc

SEQ ID NO: 72907 - DNA, 20 bp, Artificial Sequence
  chemically synthesized
tgtgtctgaggctggcccta

SEQ ID NO: 72908 - DNA, 20 bp, Artificial Sequence
  chemically synthesized
tctgaggctggccctacggt

SEQ ID NO: 72909 - DNA, 20 bp, Artificial Sequence
  chemically synthesized
gacatcccattcctacattt

SEQ ID NO: 72910 - DNA, 20 bp, Artificial Sequence
  chemically synthesized
tttaagattcacgctaaatg

SEQ ID NO: 72911 - DNA, 20 bp, Artificial Sequence
  chemically synthesized
aagattcacgctaaatgaag

SEQ ID NO: 72912 - DNA, 20 bp, Artificial Sequence
  chemically synthesized
attcacgctaaatgaagtag

SEQ ID NO: 72913 - DNA, 20 bp, Artificial Sequence
  chemically synthesized
gaagtagaagtgactccttc

SEQ ID NO: 72914 - DNA, 20 bp, Artificial Sequence
  chemically synthesized
ctccttccagctttgccaac

SEQ ID NO: 72915 - DNA, 20 bp, Artificial Sequence
  chemically synthesized
tgccaaccagcttttattac

SEQ ID NO: 72916 - DNA, 20 bp, Artificial Sequence
  chemically synthesized
gccaaccagcttttattact

SEQ ID NO: 72917 - DNA, 20 bp, Artificial Sequence
  chemically synthesized
ccaaccagcttttattacta

SEQ ID NO: 72918 - DNA, 20 bp, Artificial Sequence
  chemically synthesized
ccagcttttattactagggc

SEQ ID NO: 72919 - DNA, 20 bp, Artificial Sequence
  chemically synthesized
cagcttttattactagggca

SEQ ID NO: 72920 - DNA, 20 bp, Artificial Sequence
  chemically synthesized
agcttttattactagggcaa

SEQ ID NO: 72921 - DNA, 20 bp, Artificial Sequence
  chemically synthesized
attactagggcaagggtacc

SEQ ID NO: 72922 - DNA, 20 bp, Artificial Sequence
  chemically synthesized
taattaattcaaacttcaaa

SEQ ID NO: 72923 - DNA, 20 bp, Artificial Sequence
  chemically synthesized
ttcaaacttcaaaaagaatg

SEQ ID NO: 72924 - DNA, 20 bp, Artificial Sequence
  chemically synthesized
aaaaagaatgaagttccact

SEQ ID NO: 72925 - DNA, 20 bp, Artificial Sequence
  chemically synthesized
gaagttccactgagcttact

SEQ ID NO: 72926 - DNA, 20 bp, Artificial Sequence
  chemically synthesized
ttccactgagcttactgagc

SEQ ID NO: 72927 - DNA, 20 bp, Artificial Sequence
  chemically synthesized
tccactgagcttactgagct

SEQ ID NO: 72928 - DNA, 20 bp, Artificial Sequence
  chemically synthesized
tgagctgggacttgaactct

SEQ ID NO: 72929 - DNA, 20 bp, Artificial Sequence
  chemically synthesized
agcattctacctcattgctt

SEQ ID NO: 72930 - DNA, 20 bp, Artificial Sequence
  chemically synthesized
acctcattgctttggtgcat

SEQ ID NO: 72931 - DNA, 20 bp, Artificial Sequence
  chemically synthesized
cctcattgctttggtgcatt

SEQ ID NO: 72932 - DNA, 20 bp, Artificial Sequence
  chemically synthesized
tgcattaggtttgtaatatc

SEQ ID NO: 72933 - DNA, 20 bp, Artificial Sequence
  chemically synthesized
atctggtacctctgtttcct

SEQ ID NO: 72934 - DNA, 20 bp, Artificial Sequence
  chemically synthesized
ggtacctctgtttcctcaga

SEQ ID NO: 72935 - DNA, 20 bp, Artificial Sequence
  chemically synthesized
ctgtttcctcagatagatga

SEQ ID NO: 72936 - DNA, 20 bp, Artificial Sequence
  chemically synthesized
tcagatagatgatagaaata

SEQ ID NO: 72937 - DNA, 20 bp, Artificial Sequence
  chemically synthesized
agaaataaagatatgatatt

SEQ ID NO: 72938 - DNA, 20 bp, Artificial Sequence
  chemically synthesized
gaaataaagatatgatatta

SEQ ID NO: 72939 - DNA, 20 bp, Artificial Sequence
  chemically synthesized
ataaagatatgatattaagg

SEQ ID NO: 72940 - DNA, 20 bp, Artificial Sequence
  chemically synthesized
agctgttaatactgaatttt

SEQ ID NO: 72941 - DNA, 20 bp, Artificial Sequence
  chemically synthesized
ttaatactgaattttcagaa

SEQ ID NO: 72942 - DNA, 20 bp, Artificial Sequence
  chemically synthesized
atccctccataaaatgtatt

SEQ ID NO: 72943 - DNA, 20 bp, Artificial Sequence
  chemically synthesized
tccctccataaaatgtattt

SEQ ID NO: 72944 - DNA, 20 bp, Artificial Sequence
  chemically synthesized
ccctccataaaatgtatttg

SEQ ID NO: 72945 - DNA, 20 bp, Artificial Sequence
  chemically synthesized
cctccataaaatgtatttgg

SEQ ID NO: 72946 - DNA, 20 bp, Artificial Sequence
  chemically synthesized
tgtatttgggggacaaactg

SEQ ID NO: 72947 - DNA, 20 bp, Artificial Sequence
  chemically synthesized
gtatttgggggacaaactgc

SEQ ID NO: 72948 - DNA, 20 bp, Artificial Sequence
  chemically synthesized
atttgggggacaaactgcag

SEQ ID NO: 72949 - DNA, 20 bp, Artificial Sequence
  chemically synthesized
aactgcaggagattatattc

SEQ ID NO: 72950 - DNA, 20 bp, Artificial Sequence
  chemically synthesized
gagattatattctggcccta

SEQ ID NO: 72951 - DNA, 20 bp, Artificial Sequence
  chemically synthesized
atttattgattaatctttaa

SEQ ID NO: 72952 - DNA, 20 bp, Artificial Sequence
  chemically synthesized
tttattgattaatctttaaa

SEQ ID NO: 72953 - DNA, 20 bp, Artificial Sequence
  chemically synthesized
tgattaatctttaaaaggct

SEQ ID NO: 72954 - DNA, 20 bp, Artificial Sequence
  chemically synthesized
aggcttagtgaacaatattc

SEQ ID NO: 72955 - DNA, 20 bp, Artificial Sequence
  chemically synthesized
ttagtgaacaatattctagt

SEQ ID NO: 72956 - DNA, 20 bp, Artificial Sequence
  chemically synthesized
tatctaattcttaaatcctc

SEQ ID NO: 72957 - DNA, 20 bp, Artificial Sequence
  chemically synthesized
ctaattcttaaatcctctag

SEQ ID NO: 72958 - DNA, 20 bp, Artificial Sequence
  chemically synthesized
aattaactaatactataaaa

SEQ ID NO: 72959 - DNA, 20 bp, Artificial Sequence
  chemically synthesized
attaactaatactataaaat

SEQ ID NO: 72960 - DNA, 20 bp, Artificial Sequence
  chemically synthesized
ctaatactataaaatgggtc

SEQ ID NO: 72961 - DNA, 20 bp, Artificial Sequence
  chemically synthesized
ctataaaatgggtctggatg

SEQ ID NO: 72962 - DNA, 20 bp, Artificial Sequence
  chemically synthesized
tgacattattttataacaac

SEQ ID NO: 72963 - DNA, 20 bp, Artificial Sequence
  chemically synthesized
attattttataacaactggt

SEQ ID NO: 72964 - DNA, 20 bp, Artificial Sequence
  chemically synthesized
tattttataacaactggtaa

SEQ ID NO: 72965 - DNA, 20 bp, Artificial Sequence
  chemically synthesized
attttataacaactggtaag

SEQ ID NO: 72966 - DNA, 20 bp, Artificial Sequence
  chemically synthesized
ttttataacaactggtaaga

SEQ ID NO: 72967 - DNA, 20 bp, Artificial Sequence
  chemically synthesized
ttataacaactggtaagagg

SEQ ID NO: 72968 - DNA, 20 bp, Artificial Sequence
  chemically synthesized
ctggtaagagggagtgacta

SEQ ID NO: 72969 - DNA, 20 bp, Artificial Sequence
  chemically synthesized
agcaacaactaaaatgatct

SEQ ID NO: 72970 - DNA, 20 bp, Artificial Sequence
  chemically synthesized
gcaacaactaaaatgatctc

SEQ ID NO: 72971 - DNA, 20 bp, Artificial Sequence
  chemically synthesized
tgatctcaggaaaacctgtt

SEQ ID NO: 72972 - DNA, 20 bp, Artificial Sequence
  chemically synthesized
aacctgtttggccctatgta

SEQ ID NO: 72973 - DNA, 20 bp, Artificial Sequence
  chemically synthesized
tatggtacattacatctttt

SEQ ID NO: 72974 - DNA, 20 bp, Artificial Sequence
  chemically synthesized
tttcagtaattccactcaaa

SEQ ID NO: 72975 - DNA, 20 bp, Artificial Sequence
  chemically synthesized
tcagtaattccactcaaatg

SEQ ID NO: 72976 - DNA, 20 bp, Artificial Sequence
  chemically synthesized
tcaaatggagacttttaaca

SEQ ID NO: 72977 - DNA, 20 bp, Artificial Sequence
  chemically synthesized
tttaacaaagcaactgttct

SEQ ID NO: 72978 - DNA, 20 bp, Artificial Sequence
  chemically synthesized
ttaacaaagcaactgttctc

SEQ ID NO: 72979 - DNA, 20 bp, Artificial Sequence
  chemically synthesized
taacaaagcaactgttctca

SEQ ID NO: 72980 - DNA, 20 bp, Artificial Sequence
  chemically synthesized
aacaaagcaactgttctcag

SEQ ID NO: 72981 - DNA, 20 bp, Artificial Sequence
  chemically synthesized
aaattcattatacacatccc

SEQ ID NO: 72982 - DNA, 20 bp, Artificial Sequence
  chemically synthesized
ttatacacatccctggttga

SEQ ID NO: 72983 - DNA, 20 bp, Artificial Sequence
  chemically synthesized
tacacatccctggttgatag

SEQ ID NO: 72984 - DNA, 20 bp, Artificial Sequence
  chemically synthesized
ctggttgatagcagtgtgtc

SEQ ID NO: 72985 - DNA, 20 bp, Artificial Sequence
  chemically synthesized
ggttgatagcagtgtgtctg

SEQ ID NO: 72986 - DNA, 20 bp, Artificial Sequence
  chemically synthesized
gttgatagcagtgtgtctgg

SEQ ID NO: 72987 - DNA, 20 bp, Artificial Sequence
  chemically synthesized
gatagcagtgtgtctggagg

SEQ ID NO: 72988 - DNA, 20 bp, Artificial Sequence
  chemically synthesized
ggcagaaaccattcttgctt

SEQ ID NO: 72989 - DNA, 20 bp, Artificial Sequence
  chemically synthesized
aattacgtctgtgttatact

SEQ ID NO: 72990 - DNA, 20 bp, Artificial Sequence
  chemically synthesized
tacgtctgtgttatactgag

SEQ ID NO: 72991 - DNA, 20 bp, Artificial Sequence
  chemically synthesized
acgtctgtgttatactgagt

SEQ ID NO: 72992 - DNA, 20 bp, Artificial Sequence
  chemically synthesized
cgtctgtgttatactgagta

SEQ ID NO: 72993 - DNA, 20 bp, Artificial Sequence
  chemically synthesized
ctgtgttatactgagtaggg

SEQ ID NO: 72994 - DNA, 20 bp, Artificial Sequence
  chemically synthesized
gacacttacgttcctgataa

SEQ ID NO: 72995 - DNA, 20 bp, Artificial Sequence
  chemically synthesized
acacttacgttcctgataat

SEQ ID NO: 72996 - DNA, 20 bp, Artificial Sequence
  chemically synthesized
tacgttcctgataatgggat

SEQ ID NO: 72997 - DNA, 20 bp, Artificial Sequence
  chemically synthesized
gtgtaattcttgtttcgctc

SEQ ID NO: 72998 - DNA, 20 bp, Artificial Sequence
  chemically synthesized
tccagatttctaataccaca

SEQ ID NO: 72999 - DNA, 20 bp, Artificial Sequence
  chemically synthesized
tcacgtgtcttctctacacc

SEQ ID NO: 73000 - DNA, 20 bp, Artificial Sequence
  chemically synthesized
cacgtgtcttctctacaccc

SEQ ID NO: 73001 - DNA, 20 bp, Artificial Sequence
  chemically synthesized
acgtgtcttctctacaccca

SEQ ID NO: 73002 - DNA, 20 bp, Artificial Sequence
  chemically synthesized
cttctctacacccagggcac

SEQ ID NO: 73003 - DNA, 20 bp, Artificial Sequence
  chemically synthesized
cccagggcaccggtgaatcc

SEQ ID NO: 73004 - DNA, 20 bp, Artificial Sequence
  chemically synthesized
tgaatccaagtgtcctctga

SEQ ID NO: 73005 - DNA, 20 bp, Artificial Sequence
  chemically synthesized
caagtgtcctctgatggtca

SEQ ID NO: 73006 - DNA, 20 bp, Artificial Sequence
  chemically synthesized
tcctctgatggtcaaagttc

SEQ ID NO: 73007 - DNA, 20 bp, Artificial Sequence
  chemically synthesized
caaagttctagatgctgtcc

SEQ ID NO: 73008 - DNA, 20 bp, Artificial Sequence
  chemically synthesized
aaagttctagatgctgtccg

SEQ ID NO: 73009 - DNA, 20 bp, Artificial Sequence
  chemically synthesized
gttctagatgctgtccgagg

SEQ ID NO: 73010 - DNA, 20 bp, Artificial Sequence
  chemically synthesized
aggcagtcctgccatcaatg

SEQ ID NO: 73011 - DNA, 20 bp, Artificial Sequence
  chemically synthesized
aatgtggccgtgcatgtgtt

SEQ ID NO: 73012 - DNA, 20 bp, Artificial Sequence
  chemically synthesized
tggccgtgcatgtgttcaga

SEQ ID NO: 73013 - DNA, 20 bp, Artificial Sequence
  chemically synthesized
ggccgtgcatgtgttcagaa

SEQ ID NO: 73014 - DNA, 20 bp, Artificial Sequence
  chemically synthesized
gaaaggctgctgatgacacc

SEQ ID NO: 73015 - DNA, 20 bp, Artificial Sequence
  chemically synthesized
aaaggctgctgatgacacct

SEQ ID NO: 73016 - DNA, 20 bp, Artificial Sequence
  chemically synthesized
aggctgctgatgacacctgg

SEQ ID NO: 73017 - DNA, 20 bp, Artificial Sequence
  chemically synthesized
acctgggagccatttgcctc

SEQ ID NO: 73018 - DNA, 20 bp, Artificial Sequence
  chemically synthesized
aaatggctcccaggtgtcat

SEQ ID NO: 73019 - DNA, 20 bp, Artificial Sequence
  chemically synthesized
tggctcccaggtgtcatcag

SEQ ID NO: 73020 - DNA, 20 bp, Artificial Sequence
  chemically synthesized
agcctttctgaacacatgca

SEQ ID NO: 73021 - DNA, 20 bp, Artificial Sequence
  chemically synthesized
cacatgcacggccacattga

SEQ ID NO: 73022 - DNA, 20 bp, Artificial Sequence
  chemically synthesized
atgcacggccacattgatgg

SEQ ID NO: 73023 - DNA, 20 bp, Artificial Sequence
  chemically synthesized
tgcacggccacattgatggc

SEQ ID NO: 73024 - DNA, 20 bp, Artificial Sequence
  chemically synthesized
cattgatggcaggactgcct

SEQ ID NO: 73025 - DNA, 20 bp, Artificial Sequence
  chemically synthesized
gatggcaggactgcctcgga

SEQ ID NO: 73026 - DNA, 20 bp, Artificial Sequence
  chemically synthesized
ggactgcctcggacagcatc

SEQ ID NO: 73027 - DNA, 20 bp, Artificial Sequence
  chemically synthesized
gcatctagaactttgaccat

SEQ ID NO: 73028 - DNA, 20 bp, Artificial Sequence
  chemically synthesized
atctagaactttgaccatca

SEQ ID NO: 73029 - DNA, 20 bp, Artificial Sequence
  chemically synthesized
tctagaactttgaccatcag

SEQ ID NO: 73030 - DNA, 20 bp, Artificial Sequence
  chemically synthesized
tttgaccatcagaggacact

SEQ ID NO: 73031 - DNA, 20 bp, Artificial Sequence
  chemically synthesized
cagaggacacttggattcac

SEQ ID NO: 73032 - DNA, 20 bp, Artificial Sequence
  chemically synthesized
acttggattcaccggtgccc

SEQ ID NO: 73033 - DNA, 20 bp, Artificial Sequence
  chemically synthesized
cttggattcaccggtgccct

SEQ ID NO: 73034 - DNA, 20 bp, Artificial Sequence
  chemically synthesized
attcaccggtgccctgggtg

SEQ ID NO: 73035 - DNA, 20 bp, Artificial Sequence
  chemically synthesized
tcaccggtgccctgggtgta

SEQ ID NO: 73036 - DNA, 20 bp, Artificial Sequence
  chemically synthesized
ccggtgccctgggtgtagag

SEQ ID NO: 73037 - DNA, 20 bp, Artificial Sequence
  chemically synthesized
tgggtgtagagaagacacgt

SEQ ID NO: 73038 - DNA, 20 bp, Artificial Sequence
  chemically synthesized
gtgtagagaagacacgtgag

SEQ ID NO: 73039 - DNA, 20 bp, Artificial Sequence
  chemically synthesized
gagaagttaacaaaattgat

SEQ ID NO: 73040 - DNA, 20 bp, Artificial Sequence
  chemically synthesized
gaagttaacaaaattgatca

SEQ ID NO: 73041 - DNA, 20 bp, Artificial Sequence
  chemically synthesized
aacaaaattgatcagagtga

SEQ ID NO: 73042 - DNA, 20 bp, Artificial Sequence
  chemically synthesized
acaaaattgatcagagtgaa

SEQ ID NO: 73043 - DNA, 20 bp, Artificial Sequence
  chemically synthesized
gtgaaaggatttattctttg

SEQ ID NO: 73044 - DNA, 20 bp, Artificial Sequence
  chemically synthesized
ggatttattctttgtggtat

SEQ ID NO: 73045 - DNA, 20 bp, Artificial Sequence
  chemically synthesized
tctttgtggtattagaaatc

SEQ ID NO: 73046 - DNA, 20 bp, Artificial Sequence
  chemically synthesized
tttgtggtattagaaatctg

SEQ ID NO: 73047 - DNA, 20 bp, Artificial Sequence
  chemically synthesized
ttagaaatctggagcgaaac

SEQ ID NO: 73048 - DNA, 20 bp, Artificial Sequence
  chemically synthesized
ttacacactgatcccattat

SEQ ID NO: 73049 - DNA, 20 bp, Artificial Sequence
  chemically synthesized
tacacactgatcccattatc

SEQ ID NO: 73050 - DNA, 20 bp, Artificial Sequence
  chemically synthesized
gatcccattatcaggaacgt

SEQ ID NO: 73051 - DNA, 20 bp, Artificial Sequence
  chemically synthesized
cgtaagtgtcgacaattaat

SEQ ID NO: 73052 - DNA, 20 bp, Artificial Sequence
  chemically synthesized
aattaatgagcttccctact

SEQ ID NO: 73053 - DNA, 20 bp, Artificial Sequence
  chemically synthesized
cttccctactcagtataaca

SEQ ID NO: 73054 - DNA, 20 bp, Artificial Sequence
  chemically synthesized
cacagacgtaattgtttcca

SEQ ID NO: 73055 - DNA, 20 bp, Artificial Sequence
  chemically synthesized
gacgtaattgtttccaaagc

SEQ ID NO: 73056 - DNA, 20 bp, Artificial Sequence
  chemically synthesized
aattgtttccaaagcaagaa

SEQ ID NO: 73057 - DNA, 20 bp, Artificial Sequence
  chemically synthesized
gcaagaatggtttctgcctc

SEQ ID NO: 73058 - DNA, 20 bp, Artificial Sequence
  chemically synthesized
ccagacacactgctatcaac

SEQ ID NO: 73059 - DNA, 20 bp, Artificial Sequence
  chemically synthesized
cagacacactgctatcaacc

SEQ ID NO: 73060 - DNA, 20 bp, Artificial Sequence
  chemically synthesized
agacacactgctatcaacca

SEQ ID NO: 73061 - DNA, 20 bp, Artificial Sequence
  chemically synthesized
ggatgtgtataatgaatttt

SEQ ID NO: 73062 - DNA, 20 bp, Artificial Sequence
  chemically synthesized
gatgtgtataatgaatttta

SEQ ID NO: 73063 - DNA, 20 bp, Artificial Sequence
  chemically synthesized
atgtgtataatgaattttaa

SEQ ID NO: 73064 - DNA, 20 bp, Artificial Sequence
  chemically synthesized
gtgtataatgaattttaagg

SEQ ID NO: 73065 - DNA, 20 bp, Artificial Sequence
  chemically synthesized
atgaattttaagggagaaaa

SEQ ID NO: 73066 - DNA, 20 bp, Artificial Sequence
  chemically synthesized
tgaattttaagggagaaaat

SEQ ID NO: 73067 - DNA, 20 bp, Artificial Sequence
  chemically synthesized
agggagaaaataggtcccct

SEQ ID NO: 73068 - DNA, 20 bp, Artificial Sequence
  chemically synthesized
gaaaataggtcccctgagaa

SEQ ID NO: 73069 - DNA, 20 bp, Artificial Sequence
  chemically synthesized
gagaacagttgctttgttaa

SEQ ID NO: 73070 - DNA, 20 bp, Artificial Sequence
  chemically synthesized
tttgttaaaagtctccattt

SEQ ID NO: 73071 - DNA, 20 bp, Artificial Sequence
  chemically synthesized
gttaaaagtctccatttgag

SEQ ID NO: 73072 - DNA, 20 bp, Artificial Sequence
  chemically synthesized
atttgagtggaattactgaa

SEQ ID NO: 73073 - DNA, 20 bp, Artificial Sequence
  chemically synthesized
aagatgtaatgtaccataca

SEQ ID NO: 73074 - DNA, 20 bp, Artificial Sequence
  chemically synthesized
agatgtaatgtaccatacat

SEQ ID NO: 73075 - DNA, 20 bp, Artificial Sequence
  chemically synthesized
gatgtaatgtaccatacata

SEQ ID NO: 73076 - DNA, 20 bp, Artificial Sequence
  chemically synthesized
gtaccatacatagggccaaa

SEQ ID NO: 73077 - DNA, 20 bp, Artificial Sequence
  chemically synthesized
taccatacatagggccaaac

SEQ ID NO: 73078 - DNA, 20 bp, Artificial Sequence
  chemically synthesized
agggccaaacaggttttcct

SEQ ID NO: 73079 - DNA, 20 bp, Artificial Sequence
  chemically synthesized
aggttttcctgagatcattt

SEQ ID NO: 73080 - DNA, 20 bp, Artificial Sequence
  chemically synthesized
gatcattttagttgttgcta

SEQ ID NO: 73081 - DNA, 20 bp, Artificial Sequence
  chemically synthesized
ctatagtcactccctcttac

SEQ ID NO: 73082 - DNA, 20 bp, Artificial Sequence
  chemically synthesized
cagttgttataaaataatgt

SEQ ID NO: 73083 - DNA, 20 bp, Artificial Sequence
  chemically synthesized
aataatgtcagaactacatc

SEQ ID NO: 73084 - DNA, 20 bp, Artificial Sequence
  chemically synthesized
ctacatccagacccatttta

SEQ ID NO: 73085 - DNA, 20 bp, Artificial Sequence
  chemically synthesized
ccagacccattttatagtat

SEQ ID NO: 73086 - DNA, 20 bp, Artificial Sequence
  chemically synthesized
atagtattagttaattcttc

SEQ ID NO: 73087 - DNA, 20 bp, Artificial Sequence
  chemically synthesized
agtattagttaattcttcta

SEQ ID NO: 73088 - DNA, 20 bp, Artificial Sequence
  chemically synthesized
gtattagttaattcttctag

SEQ ID NO: 73089 - DNA, 20 bp, Artificial Sequence
  chemically synthesized
ttaattcttctagaggattt

SEQ ID NO: 73090 - DNA, 20 bp, Artificial Sequence
  chemically synthesized
cttctagaggatttaagaat

SEQ ID NO: 73091 - DNA, 20 bp, Artificial Sequence
  chemically synthesized
ttaagaattagatatctgac

SEQ ID NO: 73092 - DNA, 20 bp, Artificial Sequence
  chemically synthesized
tgactagaatattgttcact

SEQ ID NO: 73093 - DNA, 20 bp, Artificial Sequence
  chemically synthesized
attgttcactaagcctttta

SEQ ID NO: 73094 - DNA, 20 bp, Artificial Sequence
  chemically synthesized
aaatacgttttgaataacta

SEQ ID NO: 73095 - DNA, 20 bp, Artificial Sequence
  chemically synthesized
aatacgttttgaataactat

SEQ ID NO: 73096 - DNA, 20 bp, Artificial Sequence
  chemically synthesized
atacgttttgaataactata

SEQ ID NO: 73097 - DNA, 20 bp, Artificial Sequence
  chemically synthesized
gttttgaataactatagggc

SEQ ID NO: 73098 - DNA, 20 bp, Artificial Sequence
  chemically synthesized
ggccagaatataatctcctg

SEQ ID NO: 73099 - DNA, 20 bp, Artificial Sequence
  chemically synthesized
tgtcccccaaatacatttta

SEQ ID NO: 73100 - DNA, 20 bp, Artificial Sequence
  chemically synthesized
tcccccaaatacattttatg

SEQ ID NO: 73101 - DNA, 20 bp, Artificial Sequence
  chemically synthesized
cccccaaatacattttatgg

SEQ ID NO: 73102 - DNA, 20 bp, Artificial Sequence
  chemically synthesized
ccccaaatacattttatgga

SEQ ID NO: 73103 - DNA, 20 bp, Artificial Sequence
  chemically synthesized
gggatacttttctgaaaatt

SEQ ID NO: 73104 - DNA, 20 bp, Artificial Sequence
  chemically synthesized
ttctgaaaattcagtattaa

SEQ ID NO: 73105 - DNA, 20 bp, Artificial Sequence
  chemically synthesized
tttatttctatcatctatct

SEQ ID NO: 73106 - DNA, 20 bp, Artificial Sequence
  chemically synthesized
ttatttctatcatctatctg

SEQ ID NO: 73107 - DNA, 20 bp, Artificial Sequence
  chemically synthesized
ctatcatctatctgaggaaa

SEQ ID NO: 73108 - DNA, 20 bp, Artificial Sequence
  chemically synthesized
atcatctatctgaggaaaca

SEQ ID NO: 73109 - DNA, 20 bp, Artificial Sequence
  chemically synthesized
tcatctatctgaggaaacag

SEQ ID NO: 73110 - DNA, 20 bp, Artificial Sequence
  chemically synthesized
atctgaggaaacagaggtac

SEQ ID NO: 73111 - DNA, 20 bp, Artificial Sequence
  chemically synthesized
attacaaacctaatgcacca

SEQ ID NO: 73112 - DNA, 20 bp, Artificial Sequence
  chemically synthesized
acctaatgcaccaaagcaat

SEQ ID NO: 73113 - DNA, 20 bp, Artificial Sequence
  chemically synthesized
cctaatgcaccaaagcaatg

SEQ ID NO: 73114 - DNA, 20 bp, Artificial Sequence
  chemically synthesized
aatgcaccaaagcaatgagg

SEQ ID NO: 73115 - DNA, 20 bp, Artificial Sequence
  chemically synthesized
aagcaatgaggtagaatgct

SEQ ID NO: 73116 - DNA, 20 bp, Artificial Sequence
  chemically synthesized
gcaatgaggtagaatgctca

SEQ ID NO: 73117 - DNA, 20 bp, Artificial Sequence
  chemically synthesized
aggtagaatgctcagagttc

SEQ ID NO: 73118 - DNA, 20 bp, Artificial Sequence
  chemically synthesized
aatgctcagagttcaagtcc

SEQ ID NO: 73119 - DNA, 20 bp, Artificial Sequence
  chemically synthesized
tcagagttcaagtcccagct

SEQ ID NO: 73120 - DNA, 20 bp, Artificial Sequence
  chemically synthesized
agttcaagtcccagctcagt

SEQ ID NO: 73121 - DNA, 20 bp, Artificial Sequence
  chemically synthesized
aagtcccagctcagtaagct

SEQ ID NO: 73122 - DNA, 20 bp, Artificial Sequence
  chemically synthesized
tcccagctcagtaagctcag

SEQ ID NO: 73123 - DNA, 20 bp, Artificial Sequence
  chemically synthesized
gtggaacttcattctttttg

SEQ ID NO: 73124 - DNA, 20 bp, Artificial Sequence
  chemically synthesized
tgaattaattatattaaaaa

SEQ ID NO: 73125 - DNA, 20 bp, Artificial Sequence
  chemically synthesized
attatattaaaaatagatgc

SEQ ID NO: 73126 - DNA, 20 bp, Artificial Sequence
  chemically synthesized
ttatattaaaaatagatgct

SEQ ID NO: 73127 - DNA, 20 bp, Artificial Sequence
  chemically synthesized
gatgctgggtacccttgccc

SEQ ID NO: 73128 - DNA, 20 bp, Artificial Sequence
  chemically synthesized
tacccttgccctagtaataa

SEQ ID NO: 73129 - DNA, 20 bp, Artificial Sequence
  chemically synthesized
cttgccctagtaataaaagc

SEQ ID NO: 73130 - DNA, 20 bp, Artificial Sequence
  chemically synthesized
ccctagtaataaaagctggt

SEQ ID NO: 73131 - DNA, 20 bp, Artificial Sequence
  chemically synthesized
gtaataaaagctggttggca

SEQ ID NO: 73132 - DNA, 20 bp, Artificial Sequence
  chemically synthesized
taaaagctggttggcaaagc

SEQ ID NO: 73133 - DNA, 20 bp, Artificial Sequence
  chemically synthesized
aagctggttggcaaagctgg

SEQ ID NO: 73134 - DNA, 20 bp, Artificial Sequence
  chemically synthesized
agctggttggcaaagctgga

SEQ ID NO: 73135 - DNA, 20 bp, Artificial Sequence
  chemically synthesized
ctggttggcaaagctggaag

SEQ ID NO: 73136 - DNA, 20 bp, Artificial Sequence
  chemically synthesized
ggagtcacttctacttcatt

SEQ ID NO: 73137 - DNA, 20 bp, Artificial Sequence
  chemically synthesized
tttagcgtgaatcttaaatg

SEQ ID NO: 73138 - DNA, 20 bp, Artificial Sequence
  chemically synthesized
ttagcgtgaatcttaaatgt

SEQ ID NO: 73139 - DNA, 20 bp, Artificial Sequence
  chemically synthesized
gtgaatcttaaatgtaggaa

SEQ ID NO: 73140 - DNA, 20 bp, Artificial Sequence
  chemically synthesized
tgaatcttaaatgtaggaat

SEQ ID NO: 73141 - DNA, 20 bp, Artificial Sequence
  chemically synthesized
aatgtaggaatgggatgtca

SEQ ID NO: 73142 - DNA, 20 bp, Artificial Sequence
  chemically synthesized
tgtcacagaaacactcaccg

SEQ ID NO: 73143 - DNA, 20 bp, Artificial Sequence
  chemically synthesized
gtcacagaaacactcaccgt

SEQ ID NO: 73144 - DNA, 20 bp, Artificial Sequence
  chemically synthesized
tcacagaaacactcaccgta

SEQ ID NO: 73145 - DNA, 20 bp, Artificial Sequence
  chemically synthesized
agaaacactcaccgtagggc

SEQ ID NO: 73146 - DNA, 20 bp, Artificial Sequence
  chemically synthesized
actcaccgtagggccagcct

SEQ ID NO: 73147 - DNA, 20 bp, Artificial Sequence
  chemically synthesized
ccagcctcagacacaaatac

SEQ ID NO: 73148 - DNA, 20 bp, Artificial Sequence
  chemically synthesized
ctcagacacaaataccagtc

SEQ ID NO: 73149 - DNA, 20 bp, Artificial Sequence
  chemically synthesized
gacacaaataccagtccagc

SEQ ID NO: 73150 - DNA, 20 bp, Artificial Sequence
  chemically synthesized
acacaaataccagtccagca

SEQ ID NO: 73151 - DNA, 20 bp, Artificial Sequence
  chemically synthesized
caaataccagtccagcaagg

SEQ ID NO: 73152 - DNA, 20 bp, Artificial Sequence
  chemically synthesized
aataccagtccagcaaggca

SEQ ID NO: 73153 - DNA, 20 bp, Artificial Sequence
  chemically synthesized
ataccagtccagcaaggcag

SEQ ID NO: 73154 - DNA, 20 bp, Artificial Sequence
  chemically synthesized
accagtccagcaaggcagag

SEQ ID NO: 73155 - DNA, 20 bp, Artificial Sequence
  chemically synthesized
ccagtccagcaaggcagagg

SEQ ID NO: 73156 - DNA, 20 bp, Artificial Sequence
  chemically synthesized
agtccagcaaggcagaggag

SEQ ID NO: 73157 - DNA, 20 bp, Artificial Sequence
  chemically synthesized
ccagcaaggcagaggaggag

SEQ ID NO: 73158 - DNA, 20 bp, Artificial Sequence
  chemically synthesized
gcagaggaggagcagacgat

SEQ ID NO: 73159 - DNA, 20 bp, Artificial Sequence
  chemically synthesized
gaggaggagcagacgatgag

SEQ ID NO: 73160 - DNA, 20 bp, Artificial Sequence
  chemically synthesized
cgatgagaagccatcctgcc

SEQ ID NO: 73161 - DNA, 20 bp, Artificial Sequence
  chemically synthesized
gaagccatcctgccaagaat

SEQ ID NO: 73162 - DNA, 20 bp, Artificial Sequence
  chemically synthesized
gccatcctgccaagaatgag

SEQ ID NO: 73163 - DNA, 20 bp, Artificial Sequence
  chemically synthesized
gaatgagtggacttctgtga

SEQ ID NO: 73164 - DNA, 20 bp, Artificial Sequence
  chemically synthesized
acttctgtgatggctgctcc

SEQ ID NO: 73165 - DNA, 20 bp, Artificial Sequence
  chemically synthesized
tgtgatggctgctcccagcc

SEQ ID NO: 73166 - DNA, 20 bp, Artificial Sequence
  chemically synthesized
gtgatggctgctcccagcct

SEQ ID NO: 73167 - DNA, 20 bp, Artificial Sequence
  chemically synthesized
tgatggctgctcccagcctg

SEQ ID NO: 73168 - DNA, 20 bp, Artificial Sequence
  chemically synthesized
cttttatactcacttctcct

SEQ ID NO: 73169 - DNA, 20 bp, Artificial Sequence
  chemically synthesized
tatactcacttctcctgagc

SEQ ID NO: 73170 - DNA, 20 bp, Artificial Sequence
  chemically synthesized
atactcacttctcctgagct

SEQ ID NO: 73171 - DNA, 20 bp, Artificial Sequence
  chemically synthesized
gctgattctgattattgact

SEQ ID NO: 73172 - DNA, 20 bp, Artificial Sequence
  chemically synthesized
aggtttgcagtcagattggc

SEQ ID NO: 73173 - DNA, 20 bp, Artificial Sequence
  chemically synthesized
agcagcctagctcaggagaa

SEQ ID NO: 73174 - DNA, 20 bp, Artificial Sequence
  chemically synthesized
agaagtccactcattcttgg

SEQ ID NO: 73175 - DNA, 20 bp, Artificial Sequence
  chemically synthesized
tgtctgaggctggccctacg

SEQ ID NO: 73176 - DNA, 20 bp, Artificial Sequence
  chemically synthesized
ccagcttttattactagggc

SEQ ID NO: 73177 - DNA, 20 bp, Artificial Sequence
  chemically synthesized
taattaattcaaacttcaaa

SEQ ID NO: 73178 - DNA, 20 bp, Artificial Sequence
  chemically synthesized
tattaaggaagctgttaata

SEQ ID NO: 73179 - DNA, 20 bp, Artificial Sequence
  chemically synthesized
ctaattcttaaatcctctag

SEQ ID NO: 73180 - DNA, 20 bp, Artificial Sequence
  chemically synthesized
gaattaactaatactataaa

SEQ ID NO: 73181 - DNA, 20 bp, Artificial Sequence
  chemically synthesized
actaatactataaaatgggt

SEQ ID NO: 73182 - DNA, 20 bp, Artificial Sequence
  chemically synthesized
ttttataacaactggtaaga

SEQ ID NO: 73183 - DNA, 20 bp, Artificial Sequence
  chemically synthesized
acaattacgtctgtgttata

SEQ ID NO: 73184 - DNA, 20 bp, Artificial Sequence
  chemically synthesized
gacacttacgttcctgataa

SEQ ID NO: 73185 - DNA, 20 bp, Artificial Sequence
  chemically synthesized
tccagatttctaataccaca

SEQ ID NO: 73186 - DNA, 20 bp, Artificial Sequence
  chemically synthesized
tctctacacccagggcaccg

SEQ ID NO: 73187 - DNA, 20 bp, Artificial Sequence
  chemically synthesized
ctttgaccatcagaggacac

SEQ ID NO: 73188 - DNA, 20 bp, Artificial Sequence
  chemically synthesized
cacttggattcaccggtgcc

SEQ ID NO: 73189 - DNA, 20 bp, Artificial Sequence
  chemically synthesized
gagaagttaacaaaattgat

SEQ ID NO: 73190 - DNA, 20 bp, Artificial Sequence
  chemically synthesized
aacaaaattgatcagagtga

SEQ ID NO: 73191 - DNA, 20 bp, Artificial Sequence
  chemically synthesized
ttagaaatctggagcgaaac

SEQ ID NO: 73192 - DNA, 20 bp, Artificial Sequence
  chemically synthesized
gacgtaattgtttccaaagc

SEQ ID NO: 73193 - DNA, 20 bp, Artificial Sequence
  chemically synthesized
cagacacactgctatcaacc

SEQ ID NO: 73194 - DNA, 20 bp, Artificial Sequence
  chemically synthesized
atcaaccagggatgtgtata

SEQ ID NO: 73195 - DNA, 20 bp, Artificial Sequence
  chemically synthesized
gctttgttaaaagtctccat

SEQ ID NO: 73196 - DNA, 20 bp, Artificial Sequence
  chemically synthesized
gttaaaagtctccatttgag

SEQ ID NO: 73197 - DNA, 20 bp, Artificial Sequence
  chemically synthesized
agtattagttaattcttcta

SEQ ID NO: 73198 - DNA, 20 bp, Artificial Sequence
  chemically synthesized
ttaattcttctagaggattt

SEQ ID NO: 73199 - DNA, 20 bp, Artificial Sequence
  chemically synthesized
ttaagaattagatatctgac

SEQ ID NO: 73200 - DNA, 20 bp, Artificial Sequence
  chemically synthesized
gattaatcaataaatacgtt

SEQ ID NO: 73201 - DNA, 20 bp, Artificial Sequence
  chemically synthesized
gttttgaataactatagggc

SEQ ID NO: 73202 - DNA, 20 bp, Artificial Sequence
  chemically synthesized
cccccaaatacattttatgg

SEQ ID NO: 73203 - DNA, 20 bp, Artificial Sequence
  chemically synthesized
aatgcaccaaagcaatgagg

SEQ ID NO: 73204 - DNA, 20 bp, Artificial Sequence
  chemically synthesized
aagcaatgaggtagaatgct

SEQ ID NO: 73205 - DNA, 20 bp, Artificial Sequence
  chemically synthesized
aacttcattctttttgaagt

SEQ ID NO: 73206 - DNA, 20 bp, Artificial Sequence
  chemically synthesized
aattatattaaaaatagatg

SEQ ID NO: 73207 - DNA, 20 bp, Artificial Sequence
  chemically synthesized
agctggttggcaaagctgga

SEQ ID NO: 73208 - DNA, 20 bp, Artificial Sequence
  chemically synthesized
tcacttctacttcatttagc

SEQ ID NO: 73209 - DNA, 20 bp, Artificial Sequence
  chemically synthesized
ttagcgtgaatcttaaatgt

SEQ ID NO: 73210 - DNA, 20 bp, Artificial Sequence
  chemically synthesized
gtgaatcttaaatgtaggaa

SEQ ID NO: 73211 - DNA, 20 bp, Artificial Sequence
  chemically synthesized
cgatgagaagccatcctgcc

SEQ ID NO: 73212 - DNA, 20 bp, Artificial Sequence
  chemically synthesized
gagaagccatcctgccaaga

SEQ ID NO: 73213 - DNA, 20 bp, Artificial Sequence
  chemically synthesized
ataattaattcaaacttcaa

SEQ ID NO: 73214 - DNA, 20 bp, Artificial Sequence
  chemically synthesized
tctgtttcctcagatagatg

SEQ ID NO: 73215 - DNA, 20 bp, Artificial Sequence
  chemically synthesized
aagctgttaatactgaattt

SEQ ID NO: 73216 - DNA, 20 bp, Artificial Sequence
  chemically synthesized
tctaattcttaaatcctcta

SEQ ID NO: 73217 - DNA, 20 bp, Artificial Sequence
  chemically synthesized
tgatagcagtgtgtctggag

SEQ ID NO: 73218 - DNA, 20 bp, Artificial Sequence
  chemically synthesized
ctccagatttctaataccac

SEQ ID NO: 73219 - DNA, 20 bp, Artificial Sequence
  chemically synthesized
caatgtggccgtgcatgtgt

SEQ ID NO: 73220 - DNA, 20 bp, Artificial Sequence
  chemically synthesized
aggatttattctttgtggta

SEQ ID NO: 73221 - DNA, 20 bp, Artificial Sequence
  chemically synthesized
attagaaatctggagcgaaa

SEQ ID NO: 73222 - DNA, 20 bp, Artificial Sequence
  chemically synthesized
agacgtaattgtttccaaag

SEQ ID NO: 73223 - DNA, 20 bp, Artificial Sequence
  chemically synthesized
tgtgtataatgaattttaag

SEQ ID NO: 73224 - DNA, 20 bp, Artificial Sequence
  chemically synthesized
gttaattcttctagaggatt

SEQ ID NO: 73225 - DNA, 20 bp, Artificial Sequence
  chemically synthesized
tttaagaattagatatctga

SEQ ID NO: 73226 - DNA, 20 bp, Artificial Sequence
  chemically synthesized
cgttttgaataactataggg

SEQ ID NO: 73227 - DNA, 20 bp, Artificial Sequence
  chemically synthesized
taatgcaccaaagcaatgag

SEQ ID NO: 73228 - DNA, 20 bp, Artificial Sequence
  chemically synthesized
aaatgtaggaatgggatgtc

SEQ ID NO: 73229 - DNA, 20 bp, Artificial Sequence
  chemically synthesized
acgatgagaagccatcctgc

SEQ ID NO: 73230 - DNA, 20 bp, Artificial Sequence
  chemically synthesized
attctggccctatagttatt

SEQ ID NO: 73231 - DNA, 20 bp, Artificial Sequence
  chemically synthesized
aacaactaaaatgatctcag

SEQ ID NO: 73232 - DNA, 20 bp, Artificial Sequence
  chemically synthesized
taagtcaataatcagaatca

SEQ ID NO: 73233 - DNA, 20 bp, Artificial Sequence
  chemically synthesized
tcagaatcagcaggtttgca

SEQ ID NO: 73234 - DNA, 20 bp, Artificial Sequence
  chemically synthesized
agtccactcattcttggcag

SEQ ID NO: 73235 - DNA, 20 bp, Artificial Sequence
  chemically synthesized
tctgaggctggccctacggt

SEQ ID NO: 73236 - DNA, 20 bp, Artificial Sequence
  chemically synthesized
gtgacatcccattcctacat

SEQ ID NO: 73237 - DNA, 20 bp, Artificial Sequence
  chemically synthesized
atgaagtagaagtgactcct

SEQ ID NO: 73238 - DNA, 20 bp, Artificial Sequence
  chemically synthesized
gactccttccagctttgcca

SEQ ID NO: 73239 - DNA, 20 bp, Artificial Sequence
  chemically synthesized
tcaaaaagaatgaagttcca

SEQ ID NO: 73240 - DNA, 20 bp, Artificial Sequence
  chemically synthesized
gaactctgagcattctacct

SEQ ID NO: 73241 - DNA, 20 bp, Artificial Sequence
  chemically synthesized
tacctcattgctttggtgca

SEQ ID NO: 73242 - DNA, 20 bp, Artificial Sequence
  chemically synthesized
aggtttgtaatatctggtac

SEQ ID NO: 73243 - DNA, 20 bp, Artificial Sequence
  chemically synthesized
gtatttgggggacaaactgc

SEQ ID NO: 73244 - DNA, 20 bp, Artificial Sequence
  chemically synthesized
atagttattcaaaacgtatt

SEQ ID NO: 73245 - DNA, 20 bp, Artificial Sequence
  chemically synthesized
tatttattgattaatcttta

SEQ ID NO: 73246 - DNA, 20 bp, Artificial Sequence
  chemically synthesized
actaaaatgatctcaggaaa

SEQ ID NO: 73247 - DNA, 20 bp, Artificial Sequence
  chemically synthesized
tgtctggaggcagaaaccat

SEQ ID NO: 73248 - DNA, 20 bp, Artificial Sequence
  chemically synthesized
taatgggatcagtgtgtaat

SEQ ID NO: 73249 - DNA, 20 bp, Artificial Sequence
  chemically synthesized
gtgtgtaattcttgtttcgc

SEQ ID NO: 73250 - DNA, 20 bp, Artificial Sequence
  chemically synthesized
actttgaccatcagaggaca

SEQ ID NO: 73251 - DNA, 20 bp, Artificial Sequence
  chemically synthesized
taacaaaattgatcagagtg

SEQ ID NO: 73252 - DNA, 20 bp, Artificial Sequence
  chemically synthesized
aacgtaagtgtcgacaatta

SEQ ID NO: 73253 - DNA, 20 bp, Artificial Sequence
  chemically synthesized
actcagtataacacagacgt

SEQ ID NO: 73254 - DNA, 20 bp, Artificial Sequence
  chemically synthesized
gtaattgtttccaaagcaag

SEQ ID NO: 73255 - DNA, 20 bp, Artificial Sequence
  chemically synthesized
aaaataggtcccctgagaac

SEQ ID NO: 73256 - DNA, 20 bp, Artificial Sequence
  chemically synthesized
tgtaccatacatagggccaa

SEQ ID NO: 73257 - DNA, 20 bp, Artificial Sequence
  chemically synthesized
tagtattagttaattcttct

SEQ ID NO: 73258 - DNA, 20 bp, Artificial Sequence
  chemically synthesized
atattgttcactaagccttt

SEQ ID NO: 73259 - DNA, 20 bp, Artificial Sequence
  chemically synthesized
ttttaaagattaatcaataa

SEQ ID NO: 73260 - DNA, 20 bp, Artificial Sequence
  chemically synthesized
agggccagaatataatctcc

SEQ ID NO: 73261 - DNA, 20 bp, Artificial Sequence
  chemically synthesized
ttttctgaaaattcagtatt

SEQ ID NO: 73262 - DNA, 20 bp, Artificial Sequence
  chemically synthesized
cagtggaacttcattctttt

SEQ ID NO: 73263 - DNA, 20 bp, Artificial Sequence
  chemically synthesized
tgtgatggctgctcccagcc

SEQ ID NO: 73264 - DNA, 20 bp, Artificial Sequence
  chemically synthesized
tactcacttctcctgagcta

SEQ ID NO: 73265 - DNA, 20 bp, Artificial Sequence
  chemically synthesized
tgccaatctgactgcaaacc

SEQ ID NO: 73266 - DNA, 20 bp, Artificial Sequence
  chemically synthesized
tctgactgcaaacctgctga

SEQ ID NO: 73267 - DNA, 22 bp, Artificial Sequence
  chemically synthesized
actaagtcaataatcagaatca

SEQ ID NO: 73268 - DNA, 22 bp, Artificial Sequence
  chemically synthesized
agtcaataatcagaatcagcag

SEQ ID NO: 73269 - DNA, 22 bp, Artificial Sequence
  chemically synthesized
gcagtcagattggcagggataa

SEQ ID NO: 73270 - DNA, 22 bp, Artificial Sequence
  chemically synthesized
cagtcagattggcagggataag

SEQ ID NO: 73271 - DNA, 22 bp, Artificial Sequence
  chemically synthesized
gcagggataagcagcctagctc

SEQ ID NO: 73272 - DNA, 22 bp, Artificial Sequence
  chemically synthesized
gctcaggagaagtgagtataaa

SEQ ID NO: 73273 - DNA, 22 bp, Artificial Sequence
  chemically synthesized
aggagaagtgagtataaaagcc

SEQ ID NO: 73274 - DNA, 22 bp, Artificial Sequence
  chemically synthesized
ggagcagccatcacagaagtcc

SEQ ID NO: 73275 - DNA, 22 bp, Artificial Sequence
  chemically synthesized
attcttggcaggatggcttctc

SEQ ID NO: 73276 - DNA, 22 bp, Artificial Sequence
  chemically synthesized
ttggcaggatggcttctcatcg

SEQ ID NO: 73277 - DNA, 22 bp, Artificial Sequence
  chemically synthesized
ggcaggatggcttctcatcgtc

SEQ ID NO: 73278 - DNA, 22 bp, Artificial Sequence
  chemically synthesized
gcaggatggcttctcatcgtct

SEQ ID NO: 73279 - DNA, 22 bp, Artificial Sequence
  chemically synthesized
ctcatcgtctgctcctcctctg

SEQ ID NO: 73280 - DNA, 22 bp, Artificial Sequence
  chemically synthesized
tcatcgtctgctcctcctctgc

SEQ ID NO: 73281 - DNA, 22 bp, Artificial Sequence
  chemically synthesized
atcgtctgctcctcctctgcct

SEQ ID NO: 73282 - DNA, 22 bp, Artificial Sequence
  chemically synthesized
ctcctcctctgccttgctggac

SEQ ID NO: 73283 - DNA, 22 bp, Artificial Sequence
  chemically synthesized
ctcctctgccttgctggactgg

SEQ ID NO: 73284 - DNA, 22 bp, Artificial Sequence
  chemically synthesized
ctctgccttgctggactggtat

SEQ ID NO: 73285 - DNA, 22 bp, Artificial Sequence
  chemically synthesized
tgccttgctggactggtatttg

SEQ ID NO: 73286 - DNA, 22 bp, Artificial Sequence
  chemically synthesized
ccttgctggactggtatttgtg

SEQ ID NO: 73287 - DNA, 22 bp, Artificial Sequence
  chemically synthesized
gctggactggtatttgtgtctg

SEQ ID NO: 73288 - DNA, 22 bp, Artificial Sequence
  chemically synthesized
ctggactggtatttgtgtctga

SEQ ID NO: 73289 - DNA, 22 bp, Artificial Sequence
  chemically synthesized
gactggtatttgtgtctgaggc

SEQ ID NO: 73290 - DNA, 22 bp, Artificial Sequence
  chemically synthesized
gtatttgtgtctgaggctggcc

SEQ ID NO: 73291 - DNA, 22 bp, Artificial Sequence
  chemically synthesized
gtgtctgaggctggccctacgg

SEQ ID NO: 73292 - DNA, 22 bp, Artificial Sequence
  chemically synthesized
tgtctgaggctggccctacggt

SEQ ID NO: 73293 - DNA, 22 bp, Artificial Sequence
  chemically synthesized
aggctggccctacggtgagtgt

SEQ ID NO: 73294 - DNA, 22 bp, Artificial Sequence
  chemically synthesized
gccctacggtgagtgtttctgt

SEQ ID NO: 73295 - DNA, 22 bp, Artificial Sequence
  chemically synthesized
cggtgagtgtttctgtgacatc

SEQ ID NO: 73296 - DNA, 22 bp, Artificial Sequence
  chemically synthesized
ctgtgacatcccattcctacat

SEQ ID NO: 73297 - DNA, 22 bp, Artificial Sequence
  chemically synthesized
tgtgacatcccattcctacatt

SEQ ID NO: 73298 - DNA, 22 bp, Artificial Sequence
  chemically synthesized
tgacatcccattcctacattta

SEQ ID NO: 73299 - DNA, 22 bp, Artificial Sequence
  chemically synthesized
ctacatttaagattcacgctaa

SEQ ID NO: 73300 - DNA, 22 bp, Artificial Sequence
  chemically synthesized
catttaagattcacgctaaatg

SEQ ID NO: 73301 - DNA, 22 bp, Artificial Sequence
  chemically synthesized
aagattcacgctaaatgaagta

SEQ ID NO: 73302 - DNA, 22 bp, Artificial Sequence
  chemically synthesized
agattcacgctaaatgaagtag

SEQ ID NO: 73303 - DNA, 22 bp, Artificial Sequence
  chemically synthesized
acgctaaatgaagtagaagtga

SEQ ID NO: 73304 - DNA, 22 bp, Artificial Sequence
  chemically synthesized
aatgaagtagaagtgactcctt

SEQ ID NO: 73305 - DNA, 22 bp, Artificial Sequence
  chemically synthesized
cttccagctttgccaaccagct

SEQ ID NO: 73306 - DNA, 22 bp, Artificial Sequence
  chemically synthesized
ccagctttgccaaccagctttt

SEQ ID NO: 73307 - DNA, 22 bp, Artificial Sequence
  chemically synthesized
cagctttgccaaccagctttta

SEQ ID NO: 73308 - DNA, 22 bp, Artificial Sequence
  chemically synthesized
tgccaaccagcttttattacta

SEQ ID NO: 73309 - DNA, 22 bp, Artificial Sequence
  chemically synthesized
gccaaccagcttttattactag

SEQ ID NO: 73310 - DNA, 22 bp, Artificial Sequence
  chemically synthesized
ccaaccagcttttattactagg

SEQ ID NO: 73311 - DNA, 22 bp, Artificial Sequence
  chemically synthesized
ttattactagggcaagggtacc

SEQ ID NO: 73312 - DNA, 22 bp, Artificial Sequence
  chemically synthesized
tattactagggcaagggtaccc

SEQ ID NO: 73313 - DNA, 22 bp, Artificial Sequence
  chemically synthesized
attactagggcaagggtaccca

SEQ ID NO: 73314 - DNA, 22 bp, Artificial Sequence
  chemically synthesized
ttactagggcaagggtacccag

SEQ ID NO: 73315 - DNA, 22 bp, Artificial Sequence
  chemically synthesized
ctagggcaagggtacccagcat

SEQ ID NO: 73316 - DNA, 22 bp, Artificial Sequence
  chemically synthesized
gggcaagggtacccagcatcta

SEQ ID NO: 73317 - DNA, 22 bp, Artificial Sequence
  chemically synthesized
tttttaatataattaattcaaa

SEQ ID NO: 73318 - DNA, 22 bp, Artificial Sequence
  chemically synthesized
ttaatataattaattcaaactt

SEQ ID NO: 73319 - DNA, 22 bp, Artificial Sequence
  chemically synthesized
taatataattaattcaaacttc

SEQ ID NO: 73320 - DNA, 22 bp, Artificial Sequence
  chemically synthesized
aatataattaattcaaacttca

SEQ ID NO: 73321 - DNA, 22 bp, Artificial Sequence
  chemically synthesized
atataattaattcaaacttcaa

SEQ ID NO: 73322 - DNA, 22 bp, Artificial Sequence
  chemically synthesized
attcaaacttcaaaaagaatga

SEQ ID NO: 73323 - DNA, 22 bp, Artificial Sequence
  chemically synthesized
aaacttcaaaaagaatgaagtt

SEQ ID NO: 73324 - DNA, 22 bp, Artificial Sequence
  chemically synthesized
caaaaagaatgaagttccactg

SEQ ID NO: 73325 - DNA, 22 bp, Artificial Sequence
  chemically synthesized
aaaaagaatgaagttccactga

SEQ ID NO: 73326 - DNA, 22 bp, Artificial Sequence
  chemically synthesized
cactgagcttactgagctggga

SEQ ID NO: 73327 - DNA, 22 bp, Artificial Sequence
  chemically synthesized
agcttactgagctgggacttga

SEQ ID NO: 73328 - DNA, 22 bp, Artificial Sequence
  chemically synthesized
actgagctgggacttgaactct

SEQ ID NO: 73329 - DNA, 22 bp, Artificial Sequence
  chemically synthesized
ctgagctgggacttgaactctg

SEQ ID NO: 73330 - DNA, 22 bp, Artificial Sequence
  chemically synthesized
agctgggacttgaactctgagc

SEQ ID NO: 73331 - DNA, 22 bp, Artificial Sequence
  chemically synthesized
ggacttgaactctgagcattct

SEQ ID NO: 73332 - DNA, 22 bp, Artificial Sequence
  chemically synthesized
gaactctgagcattctacctca

SEQ ID NO: 73333 - DNA, 22 bp, Artificial Sequence
  chemically synthesized
aactctgagcattctacctcat

SEQ ID NO: 73334 - DNA, 22 bp, Artificial Sequence
  chemically synthesized
tgagcattctacctcattgctt

SEQ ID NO: 73335 - DNA, 22 bp, Artificial Sequence
  chemically synthesized
agcattctacctcattgctttg

SEQ ID NO: 73336 - DNA, 22 bp, Artificial Sequence
  chemically synthesized
tacctcattgctttggtgcatt

SEQ ID NO: 73337 - DNA, 22 bp, Artificial Sequence
  chemically synthesized
cctcattgctttggtgcattag

SEQ ID NO: 73338 - DNA, 22 bp, Artificial Sequence
  chemically synthesized
attgctttggtgcattaggttt

SEQ ID NO: 73339 - DNA, 22 bp, Artificial Sequence
  chemically synthesized
ctttggtgcattaggtttgtaa

SEQ ID NO: 73340 - DNA, 22 bp, Artificial Sequence
  chemically synthesized
tggtgcattaggtttgtaatat

SEQ ID NO: 73341 - DNA, 22 bp, Artificial Sequence
  chemically synthesized
ggtgcattaggtttgtaatatc

SEQ ID NO: 73342 - DNA, 22 bp, Artificial Sequence
  chemically synthesized
gtgcattaggtttgtaatatct

SEQ ID NO: 73343 - DNA, 22 bp, Artificial Sequence
  chemically synthesized
ggtttgtaatatctggtacctc

SEQ ID NO: 73344 - DNA, 22 bp, Artificial Sequence
  chemically synthesized
gtaatatctggtacctctgttt

SEQ ID NO: 73345 - DNA, 22 bp, Artificial Sequence
  chemically synthesized
taatatctggtacctctgtttc

SEQ ID NO: 73346 - DNA, 22 bp, Artificial Sequence
  chemically synthesized
gtacctctgtttcctcagatag

SEQ ID NO: 73347 - DNA, 22 bp, Artificial Sequence
  chemically synthesized
tgtttcctcagatagatgatag

SEQ ID NO: 73348 - DNA, 22 bp, Artificial Sequence
  chemically synthesized
tttcctcagatagatgatagaa

SEQ ID NO: 73349 - DNA, 22 bp, Artificial Sequence
  chemically synthesized
cctcagatagatgatagaaata

SEQ ID NO: 73350 - DNA, 22 bp, Artificial Sequence
  chemically synthesized
ctcagatagatgatagaaataa

SEQ ID NO: 73351 - DNA, 22 bp, Artificial Sequence
  chemically synthesized
agatagatgatagaaataaaga

SEQ ID NO: 73352 - DNA, 22 bp, Artificial Sequence
  chemically synthesized
aggaagctgttaatactgaatt

SEQ ID NO: 73353 - DNA, 22 bp, Artificial Sequence
  chemically synthesized
ttaatactgaattttcagaaaa

SEQ ID NO: 73354 - DNA, 22 bp, Artificial Sequence
  chemically synthesized
atactgaattttcagaaaagta

SEQ ID NO: 73355 - DNA, 22 bp, Artificial Sequence
  chemically synthesized
aattttcagaaaagtatccctc

SEQ ID NO: 73356 - DNA, 22 bp, Artificial Sequence
  chemically synthesized
tcagaaaagtatccctccataa

SEQ ID NO: 73357 - DNA, 22 bp, Artificial Sequence
  chemically synthesized
cagaaaagtatccctccataaa

SEQ ID NO: 73358 - DNA, 22 bp, Artificial Sequence
  chemically synthesized
agaaaagtatccctccataaaa

SEQ ID NO: 73359 - DNA, 22 bp, Artificial Sequence
  chemically synthesized
cataaaatgtatttgggggaca

SEQ ID NO: 73360 - DNA, 22 bp, Artificial Sequence
  chemically synthesized
gggggacaaactgcaggagatt

SEQ ID NO: 73361 - DNA, 22 bp, Artificial Sequence
  chemically synthesized
ggggacaaactgcaggagatta

SEQ ID NO: 73362 - DNA, 22 bp, Artificial Sequence
  chemically synthesized
caggagattatattctggccct

SEQ ID NO: 73363 - DNA, 22 bp, Artificial Sequence
  chemically synthesized
tattctggccctatagttattc

SEQ ID NO: 73364 - DNA, 22 bp, Artificial Sequence
  chemically synthesized
tggccctatagttattcaaaac

SEQ ID NO: 73365 - DNA, 22 bp, Artificial Sequence
  chemically synthesized
gccctatagttattcaaaacgt

SEQ ID NO: 73366 - DNA, 22 bp, Artificial Sequence
  chemically synthesized
tagttattcaaaacgtatttat

SEQ ID NO: 73367 - DNA, 22 bp, Artificial Sequence
  chemically synthesized
ttcaaaacgtatttattgatta

SEQ ID NO: 73368 - DNA, 22 bp, Artificial Sequence
  chemically synthesized
aaaacgtatttattgattaatc

SEQ ID NO: 73369 - DNA, 22 bp, Artificial Sequence
  chemically synthesized
attgattaatctttaaaaggct

SEQ ID NO: 73370 - DNA, 22 bp, Artificial Sequence
  chemically synthesized
ttgattaatctttaaaaggctt

SEQ ID NO: 73371 - DNA, 22 bp, Artificial Sequence
  chemically synthesized
attaatctttaaaaggcttagt

SEQ ID NO: 73372 - DNA, 22 bp, Artificial Sequence
  chemically synthesized
atctttaaaaggcttagtgaac

SEQ ID NO: 73373 - DNA, 22 bp, Artificial Sequence
  chemically synthesized
taaaaggcttagtgaacaatat

SEQ ID NO: 73374 - DNA, 22 bp, Artificial Sequence
  chemically synthesized
aaaaggcttagtgaacaatatt

SEQ ID NO: 73375 - DNA, 22 bp, Artificial Sequence
  chemically synthesized
aaaggcttagtgaacaatattc

SEQ ID NO: 73376 - DNA, 22 bp, Artificial Sequence
  chemically synthesized
agtgaacaatattctagtcaga

SEQ ID NO: 73377 - DNA, 22 bp, Artificial Sequence
  chemically synthesized
gtgaacaatattctagtcagat

SEQ ID NO: 73378 - DNA, 22 bp, Artificial Sequence
  chemically synthesized
tagtcagatatctaattcttaa

SEQ ID NO: 73379 - DNA, 22 bp, Artificial Sequence
  chemically synthesized
gtcagatatctaattcttaaat

SEQ ID NO: 73380 - DNA, 22 bp, Artificial Sequence
  chemically synthesized
attcttaaatcctctagaagaa

SEQ ID NO: 73381 - DNA, 22 bp, Artificial Sequence
  chemically synthesized
ttaaatcctctagaagaattaa

SEQ ID NO: 73382 - DNA, 22 bp, Artificial Sequence
  chemically synthesized
aaatcctctagaagaattaact

SEQ ID NO: 73383 - DNA, 22 bp, Artificial Sequence
  chemically synthesized
aatcctctagaagaattaacta

SEQ ID NO: 73384 - DNA, 22 bp, Artificial Sequence
  chemically synthesized
tagaagaattaactaatactat

SEQ ID NO: 73385 - DNA, 22 bp, Artificial Sequence
  chemically synthesized
gaagaattaactaatactataa

SEQ ID NO: 73386 - DNA, 22 bp, Artificial Sequence
  chemically synthesized
actaatactataaaatgggtct

SEQ ID NO: 73387 - DNA, 22 bp, Artificial Sequence
  chemically synthesized
atactataaaatgggtctggat

SEQ ID NO: 73388 - DNA, 22 bp, Artificial Sequence
  chemically synthesized
taaaatgggtctggatgtagtt

SEQ ID NO: 73389 - DNA, 22 bp, Artificial Sequence
  chemically synthesized
gatgtagttctgacattatttt

SEQ ID NO: 73390 - DNA, 22 bp, Artificial Sequence
  chemically synthesized
tgacattattttataacaactg

SEQ ID NO: 73391 - DNA, 22 bp, Artificial Sequence
  chemically synthesized
acattattttataacaactggt

SEQ ID NO: 73392 - DNA, 22 bp, Artificial Sequence
  chemically synthesized
ttttataacaactggtaagagg

SEQ ID NO: 73393 - DNA, 22 bp, Artificial Sequence
  chemically synthesized
tataacaactggtaagagggag

SEQ ID NO: 73394 - DNA, 22 bp, Artificial Sequence
  chemically synthesized
ataacaactggtaagagggagt

SEQ ID NO: 73395 - DNA, 22 bp, Artificial Sequence
  chemically synthesized
taacaactggtaagagggagtg

SEQ ID NO: 73396 - DNA, 22 bp, Artificial Sequence
  chemically synthesized
gtaagagggagtgactatagca

SEQ ID NO: 73397 - DNA, 22 bp, Artificial Sequence
  chemically synthesized
tagcaacaactaaaatgatctc

SEQ ID NO: 73398 - DNA, 22 bp, Artificial Sequence
  chemically synthesized
aaatgatctcaggaaaacctgt

SEQ ID NO: 73399 - DNA, 22 bp, Artificial Sequence
  chemically synthesized
aggaaaacctgtttggccctat

SEQ ID NO: 73400 - DNA, 22 bp, Artificial Sequence
  chemically synthesized
tttggccctatgtatggtacat

SEQ ID NO: 73401 - DNA, 22 bp, Artificial Sequence
  chemically synthesized
ggccctatgtatggtacattac

SEQ ID NO: 73402 - DNA, 22 bp, Artificial Sequence
  chemically synthesized
gccctatgtatggtacattaca

SEQ ID NO: 73403 - DNA, 22 bp, Artificial Sequence
  chemically synthesized
tgtatggtacattacatctttt

SEQ ID NO: 73404 - DNA, 22 bp, Artificial Sequence
  chemically synthesized
catcttttcagtaattccactc

SEQ ID NO: 73405 - DNA, 22 bp, Artificial Sequence
  chemically synthesized
ttcagtaattccactcaaatgg

SEQ ID NO: 73406 - DNA, 22 bp, Artificial Sequence
  chemically synthesized
tcagtaattccactcaaatgga

SEQ ID NO: 73407 - DNA, 22 bp, Artificial Sequence
  chemically synthesized
cagtaattccactcaaatggag

SEQ ID NO: 73408 - DNA, 22 bp, Artificial Sequence
  chemically synthesized
agtaattccactcaaatggaga

SEQ ID NO: 73409 - DNA, 22 bp, Artificial Sequence
  chemically synthesized
cactcaaatggagacttttaac

SEQ ID NO: 73410 - DNA, 22 bp, Artificial Sequence
  chemically synthesized
aaatggagacttttaacaaagc

SEQ ID NO: 73411 - DNA, 22 bp, Artificial Sequence
  chemically synthesized
ttaacaaagcaactgttctcag

SEQ ID NO: 73412 - DNA, 22 bp, Artificial Sequence
  chemically synthesized
taacaaagcaactgttctcagg

SEQ ID NO: 73413 - DNA, 22 bp, Artificial Sequence
  chemically synthesized
aacaaagcaactgttctcaggg

SEQ ID NO: 73414 - DNA, 22 bp, Artificial Sequence
  chemically synthesized
acaaagcaactgttctcagggg

SEQ ID NO: 73415 - DNA, 22 bp, Artificial Sequence
  chemically synthesized
ttctcaggggacctattttctc

SEQ ID NO: 73416 - DNA, 22 bp, Artificial Sequence
  chemically synthesized
tcaggggacctattttctccct

SEQ ID NO: 73417 - DNA, 22 bp, Artificial Sequence
  chemically synthesized
aggggacctattttctccctta

SEQ ID NO: 73418 - DNA, 22 bp, Artificial Sequence
  chemically synthesized
ttttctcccttaaaattcatta

SEQ ID NO: 73419 - DNA, 22 bp, Artificial Sequence
  chemically synthesized
tctcccttaaaattcattatac

SEQ ID NO: 73420 - DNA, 22 bp, Artificial Sequence
  chemically synthesized
ctcccttaaaattcattataca

SEQ ID NO: 73421 - DNA, 22 bp, Artificial Sequence
  chemically synthesized
tcccttaaaattcattatacac

SEQ ID NO: 73422 - DNA, 22 bp, Artificial Sequence
  chemically synthesized
ccttaaaattcattatacacat

SEQ ID NO: 73423 - DNA, 22 bp, Artificial Sequence
  chemically synthesized
aaaattcattatacacatccct

SEQ ID NO: 73424 - DNA, 22 bp, Artificial Sequence
  chemically synthesized
aaattcattatacacatccctg

SEQ ID NO: 73425 - DNA, 22 bp, Artificial Sequence
  chemically synthesized
attatacacatccctggttgat

SEQ ID NO: 73426 - DNA, 22 bp, Artificial Sequence
  chemically synthesized
tacacatccctggttgatagca

SEQ ID NO: 73427 - DNA, 22 bp, Artificial Sequence
  chemically synthesized
gttgatagcagtgtgtctggag

SEQ ID NO: 73428 - DNA, 22 bp, Artificial Sequence
  chemically synthesized
atagcagtgtgtctggaggcag

SEQ ID NO: 73429 - DNA, 22 bp, Artificial Sequence
  chemically synthesized
gaggcagaaaccattcttgctt

SEQ ID NO: 73430 - DNA, 22 bp, Artificial Sequence
  chemically synthesized
ttgctttggaaacaattacgtc

SEQ ID NO: 73431 - DNA, 22 bp, Artificial Sequence
  chemically synthesized
gctttggaaacaattacgtctg

SEQ ID NO: 73432 - DNA, 22 bp, Artificial Sequence
  chemically synthesized
ctttggaaacaattacgtctgt

SEQ ID NO: 73433 - DNA, 22 bp, Artificial Sequence
  chemically synthesized
tggaaacaattacgtctgtgtt

SEQ ID NO: 73434 - DNA, 22 bp, Artificial Sequence
  chemically synthesized
ggaaacaattacgtctgtgtta

SEQ ID NO: 73435 - DNA, 22 bp, Artificial Sequence
  chemically synthesized
gaaacaattacgtctgtgttat

SEQ ID NO: 73436 - DNA, 22 bp, Artificial Sequence
  chemically synthesized
cgtctgtgttatactgagtagg

SEQ ID NO: 73437 - DNA, 22 bp, Artificial Sequence
  chemically synthesized
tgttatactgagtagggaagct

SEQ ID NO: 73438 - DNA, 22 bp, Artificial Sequence
  chemically synthesized
tactgagtagggaagctcatta

SEQ ID NO: 73439 - DNA, 22 bp, Artificial Sequence
  chemically synthesized
agtagggaagctcattaattgt

SEQ ID NO: 73440 - DNA, 22 bp, Artificial Sequence
  chemically synthesized
attaattgtcgacacttacgtt

SEQ ID NO: 73441 - DNA, 22 bp, Artificial Sequence
  chemically synthesized
attgtcgacacttacgttcctg

SEQ ID NO: 73442 - DNA, 22 bp, Artificial Sequence
  chemically synthesized
tcgacacttacgttcctgataa

SEQ ID NO: 73443 - DNA, 22 bp, Artificial Sequence
  chemically synthesized
acgttcctgataatgggatcag

SEQ ID NO: 73444 - DNA, 22 bp, Artificial Sequence
  chemically synthesized
cgttcctgataatgggatcagt

SEQ ID NO: 73445 - DNA, 22 bp, Artificial Sequence
  chemically synthesized
ctgataatgggatcagtgtgta

SEQ ID NO: 73446 - DNA, 22 bp, Artificial Sequence
  chemically synthesized
ataatgggatcagtgtgtaatt

SEQ ID NO: 73447 - DNA, 22 bp, Artificial Sequence
  chemically synthesized
ttgtttcgctccagatttctaa

SEQ ID NO: 73448 - DNA, 22 bp, Artificial Sequence
  chemically synthesized
gtttcgctccagatttctaata

SEQ ID NO: 73449 - DNA, 22 bp, Artificial Sequence
  chemically synthesized
tttcgctccagatttctaatac

SEQ ID NO: 73450 - DNA, 22 bp, Artificial Sequence
  chemically synthesized
cgctccagatttctaataccac

SEQ ID NO: 73451 - DNA, 22 bp, Artificial Sequence
  chemically synthesized
gctccagatttctaataccaca

SEQ ID NO: 73452 - DNA, 22 bp, Artificial Sequence
  chemically synthesized
cagatttctaataccacaaaga

SEQ ID NO: 73453 - DNA, 22 bp, Artificial Sequence
  chemically synthesized
ctaataccacaaagaataaatc

SEQ ID NO: 73454 - DNA, 22 bp, Artificial Sequence
  chemically synthesized
taataccacaaagaataaatcc

SEQ ID NO: 73455 - DNA, 22 bp, Artificial Sequence
  chemically synthesized
ataccacaaagaataaatcctt

SEQ ID NO: 73456 - DNA, 22 bp, Artificial Sequence
  chemically synthesized
tcactctgatcaattttgttaa

SEQ ID NO: 73457 - DNA, 22 bp, Artificial Sequence
  chemically synthesized
cactctgatcaattttgttaac

SEQ ID NO: 73458 - DNA, 22 bp, Artificial Sequence
  chemically synthesized
actctgatcaattttgttaact

SEQ ID NO: 73459 - DNA, 22 bp, Artificial Sequence
  chemically synthesized
tgatcaattttgttaacttctc

SEQ ID NO: 73460 - DNA, 22 bp, Artificial Sequence
  chemically synthesized
atcaattttgttaacttctcac

SEQ ID NO: 73461 - DNA, 22 bp, Artificial Sequence
  chemically synthesized
tgttaacttctcacgtgtcttc

SEQ ID NO: 73462 - DNA, 22 bp, Artificial Sequence
  chemically synthesized
gttaacttctcacgtgtcttct

SEQ ID NO: 73463 - DNA, 22 bp, Artificial Sequence
  chemically synthesized
ttaacttctcacgtgtcttctc

SEQ ID NO: 73464 - DNA, 22 bp, Artificial Sequence
  chemically synthesized
acttctcacgtgtcttctctac

SEQ ID NO: 73465 - DNA, 22 bp, Artificial Sequence
  chemically synthesized
ctcacgtgtcttctctacaccc

SEQ ID NO: 73466 - DNA, 22 bp, Artificial Sequence
  chemically synthesized
tcacgtgtcttctctacaccca

SEQ ID NO: 73467 - DNA, 22 bp, Artificial Sequence
  chemically synthesized
acgtgtcttctctacacccagg

SEQ ID NO: 73468 - DNA, 22 bp, Artificial Sequence
  chemically synthesized
ctctacacccagggcaccggtg

SEQ ID NO: 73469 - DNA, 22 bp, Artificial Sequence
  chemically synthesized
tctacacccagggcaccggtga

SEQ ID NO: 73470 - DNA, 22 bp, Artificial Sequence
  chemically synthesized
tacacccagggcaccggtgaat

SEQ ID NO: 73471 - DNA, 22 bp, Artificial Sequence
  chemically synthesized
cacccagggcaccggtgaatcc

SEQ ID NO: 73472 - DNA, 22 bp, Artificial Sequence
  chemically synthesized
tgatggtcaaagttctagatgc

SEQ ID NO: 73473 - DNA, 22 bp, Artificial Sequence
  chemically synthesized
atggtcaaagttctagatgctg

SEQ ID NO: 73474 - DNA, 22 bp, Artificial Sequence
  chemically synthesized
tagatgctgtccgaggcagtcc

SEQ ID NO: 73475 - DNA, 22 bp, Artificial Sequence
  chemically synthesized
gatgctgtccgaggcagtcctg

SEQ ID NO: 73476 - DNA, 22 bp, Artificial Sequence
  chemically synthesized
tccgaggcagtcctgccatcaa

SEQ ID NO: 73477 - DNA, 22 bp, Artificial Sequence
  chemically synthesized
ccatcaatgtggccgtgcatgt

SEQ ID NO: 73478 - DNA, 22 bp, Artificial Sequence
  chemically synthesized
agaaaggctgctgatgacacct

SEQ ID NO: 73479 - DNA, 22 bp, Artificial Sequence
  chemically synthesized
ctgatgacacctgggagccatt

SEQ ID NO: 73480 - DNA, 22 bp, Artificial Sequence
  chemically synthesized
atgacacctgggagccatttgc

SEQ ID NO: 73481 - DNA, 22 bp, Artificial Sequence
  chemically synthesized
ccaggtgtcatcagcagccttt

SEQ ID NO: 73482 - DNA, 22 bp, Artificial Sequence
  chemically synthesized
tctgaacacatgcacggccaca

SEQ ID NO: 73483 - DNA, 22 bp, Artificial Sequence
  chemically synthesized
ctgaacacatgcacggccacat

SEQ ID NO: 73484 - DNA, 22 bp, Artificial Sequence
  chemically synthesized
tgaacacatgcacggccacatt

SEQ ID NO: 73485 - DNA, 22 bp, Artificial Sequence
  chemically synthesized
aacacatgcacggccacattga

SEQ ID NO: 73486 - DNA, 22 bp, Artificial Sequence
  chemically synthesized
atggcaggactgcctcggacag

SEQ ID NO: 73487 - DNA, 22 bp, Artificial Sequence
  chemically synthesized
cctcggacagcatctagaactt

SEQ ID NO: 73488 - DNA, 22 bp, Artificial Sequence
  chemically synthesized
ggacagcatctagaactttgac

SEQ ID NO: 73489 - DNA, 22 bp, Artificial Sequence
  chemically synthesized
gaactttgaccatcagaggaca

SEQ ID NO: 73490 - DNA, 22 bp, Artificial Sequence
  chemically synthesized
tgaccatcagaggacacttgga

SEQ ID NO: 73491 - DNA, 22 bp, Artificial Sequence
  chemically synthesized
gaccatcagaggacacttggat

SEQ ID NO: 73492 - DNA, 22 bp, Artificial Sequence
  chemically synthesized
accatcagaggacacttggatt

SEQ ID NO: 73493 - DNA, 22 bp, Artificial Sequence
  chemically synthesized
ggattcaccggtgccctgggtg

SEQ ID NO: 73494 - DNA, 22 bp, Artificial Sequence
  chemically synthesized
gattcaccggtgccctgggtgt

SEQ ID NO: 73495 - DNA, 22 bp, Artificial Sequence
  chemically synthesized
accggtgccctgggtgtagaga

SEQ ID NO: 73496 - DNA, 22 bp, Artificial Sequence
  chemically synthesized
ggtgtagagaagacacgtgaga

SEQ ID NO: 73497 - DNA, 22 bp, Artificial Sequence
  chemically synthesized
acaaaattgatcagagtgaaag

SEQ ID NO: 73498 - DNA, 22 bp, Artificial Sequence
  chemically synthesized
atcagagtgaaaggatttattc

SEQ ID NO: 73499 - DNA, 22 bp, Artificial Sequence
  chemically synthesized
attctttgtggtattagaaatc

SEQ ID NO: 73500 - DNA, 22 bp, Artificial Sequence
  chemically synthesized
ttctttgtggtattagaaatct

SEQ ID NO: 73501 - DNA, 22 bp, Artificial Sequence
  chemically synthesized
tttgtggtattagaaatctgga

SEQ ID NO: 73502 - DNA, 22 bp, Artificial Sequence
  chemically synthesized
tgtggtattagaaatctggagc

SEQ ID NO: 73503 - DNA, 22 bp, Artificial Sequence
  chemically synthesized
gtggtattagaaatctggagcg

SEQ ID NO: 73504 - DNA, 22 bp, Artificial Sequence
  chemically synthesized
tggtattagaaatctggagcga

SEQ ID NO: 73505 - DNA, 22 bp, Artificial Sequence
  chemically synthesized
gaaatctggagcgaaacaagaa

SEQ ID NO: 73506 - DNA, 22 bp, Artificial Sequence
  chemically synthesized
gagcgaaacaagaattacacac

SEQ ID NO: 73507 - DNA, 22 bp, Artificial Sequence
  chemically synthesized
cacactgatcccattatcagga

SEQ ID NO: 73508 - DNA, 22 bp, Artificial Sequence
  chemically synthesized
atcccattatcaggaacgtaag

SEQ ID NO: 73509 - DNA, 22 bp, Artificial Sequence
  chemically synthesized
tcaggaacgtaagtgtcgacaa

SEQ ID NO: 73510 - DNA, 22 bp, Artificial Sequence
  chemically synthesized
atgagcttccctactcagtata

SEQ ID NO: 73511 - DNA, 22 bp, Artificial Sequence
  chemically synthesized
ccctactcagtataacacagac

SEQ ID NO: 73512 - DNA, 22 bp, Artificial Sequence
  chemically synthesized
cctactcagtataacacagacg

SEQ ID NO: 73513 - DNA, 22 bp, Artificial Sequence
  chemically synthesized
ctcagtataacacagacgtaat

SEQ ID NO: 73514 - DNA, 22 bp, Artificial Sequence
  chemically synthesized
agtataacacagacgtaattgt

SEQ ID NO: 73515 - DNA, 22 bp, Artificial Sequence
  chemically synthesized
tttccaaagcaagaatggtttc

SEQ ID NO: 73516 - DNA, 22 bp, Artificial Sequence
  chemically synthesized
ccaaagcaagaatggtttctgc

SEQ ID NO: 73517 - DNA, 22 bp, Artificial Sequence
  chemically synthesized
caaagcaagaatggtttctgcc

SEQ ID NO: 73518 - DNA, 22 bp, Artificial Sequence
  chemically synthesized
ctgcctccagacacactgctat

SEQ ID NO: 73519 - DNA, 22 bp, Artificial Sequence
  chemically synthesized
tgcctccagacacactgctatc

SEQ ID NO: 73520 - DNA, 22 bp, Artificial Sequence
  chemically synthesized
cctccagacacactgctatcaa

SEQ ID NO: 73521 - DNA, 22 bp, Artificial Sequence
  chemically synthesized
cagacacactgctatcaaccag

SEQ ID NO: 73522 - DNA, 22 bp, Artificial Sequence
  chemically synthesized
ctatcaaccagggatgtgtata

SEQ ID NO: 73523 - DNA, 22 bp, Artificial Sequence
  chemically synthesized
tcaaccagggatgtgtataatg

SEQ ID NO: 73524 - DNA, 22 bp, Artificial Sequence
  chemically synthesized
taagggagaaaataggtcccct

SEQ ID NO: 73525 - DNA, 22 bp, Artificial Sequence
  chemically synthesized
aagggagaaaataggtcccctg

SEQ ID NO: 73526 - DNA, 22 bp, Artificial Sequence
  chemically synthesized
agggagaaaataggtcccctga

SEQ ID NO: 73527 - DNA, 22 bp, Artificial Sequence
  chemically synthesized
agaacagttgctttgttaaaag

SEQ ID NO: 73528 - DNA, 22 bp, Artificial Sequence
  chemically synthesized
ctttgttaaaagtctccatttg

SEQ ID NO: 73529 - DNA, 22 bp, Artificial Sequence
  chemically synthesized
tgttaaaagtctccatttgagt

SEQ ID NO: 73530 - DNA, 22 bp, Artificial Sequence
  chemically synthesized
gttaaaagtctccatttgagtg

SEQ ID NO: 73531 - DNA, 22 bp, Artificial Sequence
  chemically synthesized
ttaaaagtctccatttgagtgg

SEQ ID NO: 73532 - DNA, 22 bp, Artificial Sequence
  chemically synthesized
aaagtctccatttgagtggaat

SEQ ID NO: 73533 - DNA, 22 bp, Artificial Sequence
  chemically synthesized
catttgagtggaattactgaaa

SEQ ID NO: 73534 - DNA, 22 bp, Artificial Sequence
  chemically synthesized
gagtggaattactgaaaagatg

SEQ ID NO: 73535 - DNA, 22 bp, Artificial Sequence
  chemically synthesized
agtggaattactgaaaagatgt

SEQ ID NO: 73536 - DNA, 22 bp, Artificial Sequence
  chemically synthesized
ctgaaaagatgtaatgtaccat

SEQ ID NO: 73537 - DNA, 22 bp, Artificial Sequence
  chemically synthesized
aaaagatgtaatgtaccataca

SEQ ID NO: 73538 - DNA, 22 bp, Artificial Sequence
  chemically synthesized
tcctgagatcattttagttgtt

SEQ ID NO: 73539 - DNA, 22 bp, Artificial Sequence
  chemically synthesized
cctgagatcattttagttgttg

SEQ ID NO: 73540 - DNA, 22 bp, Artificial Sequence
  chemically synthesized
ctgagatcattttagttgttgc

SEQ ID NO: 73541 - DNA, 22 bp, Artificial Sequence
  chemically synthesized
agatcattttagttgttgctat

SEQ ID NO: 73542 - DNA, 22 bp, Artificial Sequence
  chemically synthesized
tagttgttgctatagtcactcc

SEQ ID NO: 73543 - DNA, 22 bp, Artificial Sequence
  chemically synthesized
agttgttgctatagtcactccc

SEQ ID NO: 73544 - DNA, 22 bp, Artificial Sequence
  chemically synthesized
gttgttgctatagtcactccct

SEQ ID NO: 73545 - DNA, 22 bp, Artificial Sequence
  chemically synthesized
ttgctatagtcactccctctta

SEQ ID NO: 73546 - DNA, 22 bp, Artificial Sequence
  chemically synthesized
ctatagtcactccctcttacca

SEQ ID NO: 73547 - DNA, 22 bp, Artificial Sequence
  chemically synthesized
tagtcactccctcttaccagtt

SEQ ID NO: 73548 - DNA, 22 bp, Artificial Sequence
  chemically synthesized
cctcttaccagttgttataaaa

SEQ ID NO: 73549 - DNA, 22 bp, Artificial Sequence
  chemically synthesized
ttaccagttgttataaaataat

SEQ ID NO: 73550 - DNA, 22 bp, Artificial Sequence
  chemically synthesized
accagttgttataaaataatgt

SEQ ID NO: 73551 - DNA, 22 bp, Artificial Sequence
  chemically synthesized
ccagttgttataaaataatgtc

SEQ ID NO: 73552 - DNA, 22 bp, Artificial Sequence
  chemically synthesized
ttataaaataatgtcagaacta

SEQ ID NO: 73553 - DNA, 22 bp, Artificial Sequence
  chemically synthesized
taaaataatgtcagaactacat

SEQ ID NO: 73554 - DNA, 22 bp, Artificial Sequence
  chemically synthesized
catccagacccattttatagta

SEQ ID NO: 73555 - DNA, 22 bp, Artificial Sequence
  chemically synthesized
tatagtattagttaattcttct

SEQ ID NO: 73556 - DNA, 22 bp, Artificial Sequence
  chemically synthesized
atagtattagttaattcttcta

SEQ ID NO: 73557 - DNA, 22 bp, Artificial Sequence
  chemically synthesized
tagtattagttaattcttctag

SEQ ID NO: 73558 - DNA, 22 bp, Artificial Sequence
  chemically synthesized
gttaattcttctagaggattta

SEQ ID NO: 73559 - DNA, 22 bp, Artificial Sequence
  chemically synthesized
attcttctagaggatttaagaa

SEQ ID NO: 73560 - DNA, 22 bp, Artificial Sequence
  chemically synthesized
ttctagaggatttaagaattag

SEQ ID NO: 73561 - DNA, 22 bp, Artificial Sequence
  chemically synthesized
ctagaggatttaagaattagat

SEQ ID NO: 73562 - DNA, 22 bp, Artificial Sequence
  chemically synthesized
tagaggatttaagaattagata

SEQ ID NO: 73563 - DNA, 22 bp, Artificial Sequence
  chemically synthesized
gaggatttaagaattagatatc

SEQ ID NO: 73564 - DNA, 22 bp, Artificial Sequence
  chemically synthesized
aagaattagatatctgactaga

SEQ ID NO: 73565 - DNA, 22 bp, Artificial Sequence
  chemically synthesized
agaattagatatctgactagaa

SEQ ID NO: 73566 - DNA, 22 bp, Artificial Sequence
  chemically synthesized
gatatctgactagaatattgtt

SEQ ID NO: 73567 - DNA, 22 bp, Artificial Sequence
  chemically synthesized
actagaatattgttcactaagc

SEQ ID NO: 73568 - DNA, 22 bp, Artificial Sequence
  chemically synthesized
gaatattgttcactaagccttt

SEQ ID NO: 73569 - DNA, 22 bp, Artificial Sequence
  chemically synthesized
ttcactaagccttttaaagatt

SEQ ID NO: 73570 - DNA, 22 bp, Artificial Sequence
  chemically synthesized
actaagccttttaaagattaat

SEQ ID NO: 73571 - DNA, 22 bp, Artificial Sequence
  chemically synthesized
agccttttaaagattaatcaat

SEQ ID NO: 73572 - DNA, 22 bp, Artificial Sequence
  chemically synthesized
ttaaagattaatcaataaatac

SEQ ID NO: 73573 - DNA, 22 bp, Artificial Sequence
  chemically synthesized
taaagattaatcaataaatacg

SEQ ID NO: 73574 - DNA, 22 bp, Artificial Sequence
  chemically synthesized
aaagattaatcaataaatacgt

SEQ ID NO: 73575 - DNA, 22 bp, Artificial Sequence
  chemically synthesized
aagattaatcaataaatacgtt

SEQ ID NO: 73576 - DNA, 22 bp, Artificial Sequence
  chemically synthesized
atcaataaatacgttttgaata

SEQ ID NO: 73577 - DNA, 22 bp, Artificial Sequence
  chemically synthesized
tgaataactatagggccagaat

SEQ ID NO: 73578 - DNA, 22 bp, Artificial Sequence
  chemically synthesized
gaataactatagggccagaata

SEQ ID NO: 73579 - DNA, 22 bp, Artificial Sequence
  chemically synthesized
aataactatagggccagaatat

SEQ ID NO: 73580 - DNA, 22 bp, Artificial Sequence
  chemically synthesized
tagggccagaatataatctcct

SEQ ID NO: 73581 - DNA, 22 bp, Artificial Sequence
  chemically synthesized
ctgcagtttgtcccccaaatac

SEQ ID NO: 73582 - DNA, 22 bp, Artificial Sequence
  chemically synthesized
cagtttgtcccccaaatacatt

SEQ ID NO: 73583 - DNA, 22 bp, Artificial Sequence
  chemically synthesized
gtcccccaaatacattttatgg

SEQ ID NO: 73584 - DNA, 22 bp, Artificial Sequence
  chemically synthesized
tcccccaaatacattttatgga

SEQ ID NO: 73585 - DNA, 22 bp, Artificial Sequence
  chemically synthesized
tatggagggatacttttctgaa

SEQ ID NO: 73586 - DNA, 22 bp, Artificial Sequence
  chemically synthesized
atggagggatacttttctgaaa

SEQ ID NO: 73587 - DNA, 22 bp, Artificial Sequence
  chemically synthesized
tggagggatacttttctgaaaa

SEQ ID NO: 73588 - DNA, 22 bp, Artificial Sequence
  chemically synthesized
ttctgaaaattcagtattaaca

SEQ ID NO: 73589 - DNA, 22 bp, Artificial Sequence
  chemically synthesized
tctgaaaattcagtattaacag

SEQ ID NO: 73590 - DNA, 22 bp, Artificial Sequence
  chemically synthesized
ctgaaaattcagtattaacagc

SEQ ID NO: 73591 - DNA, 22 bp, Artificial Sequence
  chemically synthesized
tgaaaattcagtattaacagct

SEQ ID NO: 73592 - DNA, 22 bp, Artificial Sequence
  chemically synthesized
aaaattcagtattaacagcttc

SEQ ID NO: 73593 - DNA, 22 bp, Artificial Sequence
  chemically synthesized
agtattaacagcttccttaata

SEQ ID NO: 73594 - DNA, 22 bp, Artificial Sequence
  chemically synthesized
acagcttccttaatatcatatc

SEQ ID NO: 73595 - DNA, 22 bp, Artificial Sequence
  chemically synthesized
ccttaatatcatatctttattt

SEQ ID NO: 73596 - DNA, 22 bp, Artificial Sequence
  chemically synthesized
cttaatatcatatctttatttc

SEQ ID NO: 73597 - DNA, 22 bp, Artificial Sequence
  chemically synthesized
aatatcatatctttatttctat

SEQ ID NO: 73598 - DNA, 22 bp, Artificial Sequence
  chemically synthesized
atatcatatctttatttctatc

SEQ ID NO: 73599 - DNA, 22 bp, Artificial Sequence
  chemically synthesized
tatttctatcatctatctgagg

SEQ ID NO: 73600 - DNA, 22 bp, Artificial Sequence
  chemically synthesized
atttctatcatctatctgagga

SEQ ID NO: 73601 - DNA, 22 bp, Artificial Sequence
  chemically synthesized
tttctatcatctatctgaggaa

SEQ ID NO: 73602 - DNA, 22 bp, Artificial Sequence
  chemically synthesized
ctatcatctatctgaggaaaca

SEQ ID NO: 73603 - DNA, 22 bp, Artificial Sequence
  chemically synthesized
tatcatctatctgaggaaacag

SEQ ID NO: 73604 - DNA, 22 bp, Artificial Sequence
  chemically synthesized
tcatctatctgaggaaacagag

SEQ ID NO: 73605 - DNA, 22 bp, Artificial Sequence
  chemically synthesized
tctgaggaaacagaggtaccag

SEQ ID NO: 73606 - DNA, 22 bp, Artificial Sequence
  chemically synthesized
aggaaacagaggtaccagatat

SEQ ID NO: 73607 - DNA, 22 bp, Artificial Sequence
  chemically synthesized
caaacctaatgcaccaaagcaa

SEQ ID NO: 73608 - DNA, 22 bp, Artificial Sequence
  chemically synthesized
atgcaccaaagcaatgaggtag

SEQ ID NO: 73609 - DNA, 22 bp, Artificial Sequence
  chemically synthesized
agagttcaagtcccagctcagt

SEQ ID NO: 73610 - DNA, 22 bp, Artificial Sequence
  chemically synthesized
aagtcccagctcagtaagctca

SEQ ID NO: 73611 - DNA, 22 bp, Artificial Sequence
  chemically synthesized
agtaagctcagtggaacttcat

SEQ ID NO: 73612 - DNA, 22 bp, Artificial Sequence
  chemically synthesized
agtggaacttcattctttttga

SEQ ID NO: 73613 - DNA, 22 bp, Artificial Sequence
  chemically synthesized
cattctttttgaagtttgaatt

SEQ ID NO: 73614 - DNA, 22 bp, Artificial Sequence
  chemically synthesized
attctttttgaagtttgaatta

SEQ ID NO: 73615 - DNA, 22 bp, Artificial Sequence
  chemically synthesized
tttttgaagtttgaattaatta

SEQ ID NO: 73616 - DNA, 22 bp, Artificial Sequence
  chemically synthesized
tttgaagtttgaattaattata

SEQ ID NO: 73617 - DNA, 22 bp, Artificial Sequence
  chemically synthesized
ttgaagtttgaattaattatat

SEQ ID NO: 73618 - DNA, 22 bp, Artificial Sequence
  chemically synthesized
tgaagtttgaattaattatatt

SEQ ID NO: 73619 - DNA, 22 bp, Artificial Sequence
  chemically synthesized
gaagtttgaattaattatatta

SEQ ID NO: 73620 - DNA, 22 bp, Artificial Sequence
  chemically synthesized
aagtttgaattaattatattaa

SEQ ID NO: 73621 - DNA, 22 bp, Artificial Sequence
  chemically synthesized
gaattaattatattaaaaatag

SEQ ID NO: 73622 - DNA, 22 bp, Artificial Sequence
  chemically synthesized
aattaattatattaaaaataga

SEQ ID NO: 73623 - DNA, 22 bp, Artificial Sequence
  chemically synthesized
attatattaaaaatagatgctg

SEQ ID NO: 73624 - DNA, 22 bp, Artificial Sequence
  chemically synthesized
tattaaaaatagatgctgggta

SEQ ID NO: 73625 - DNA, 22 bp, Artificial Sequence
  chemically synthesized
aaaatagatgctgggtaccctt

SEQ ID NO: 73626 - DNA, 22 bp, Artificial Sequence
  chemically synthesized
ggtacccttgccctagtaataa

SEQ ID NO: 73627 - DNA, 22 bp, Artificial Sequence
  chemically synthesized
gccctagtaataaaagctggtt

SEQ ID NO: 73628 - DNA, 22 bp, Artificial Sequence
  chemically synthesized
ccctagtaataaaagctggttg

SEQ ID NO: 73629 - DNA, 22 bp, Artificial Sequence
  chemically synthesized
gtaataaaagctggttggcaaa

SEQ ID NO: 73630 - DNA, 22 bp, Artificial Sequence
  chemically synthesized
gttggcaaagctggaaggagtc

SEQ ID NO: 73631 - DNA, 22 bp, Artificial Sequence
  chemically synthesized
gcaaagctggaaggagtcactt

SEQ ID NO: 73632 - DNA, 22 bp, Artificial Sequence
  chemically synthesized
gaaggagtcacttctacttcat

SEQ ID NO: 73633 - DNA, 22 bp, Artificial Sequence
  chemically synthesized
ctacttcatttagcgtgaatct

SEQ ID NO: 73634 - DNA, 22 bp, Artificial Sequence
  chemically synthesized
tacttcatttagcgtgaatctt

SEQ ID NO: 73635 - DNA, 22 bp, Artificial Sequence
  chemically synthesized
cttcatttagcgtgaatcttaa

SEQ ID NO: 73636 - DNA, 22 bp, Artificial Sequence
  chemically synthesized
catttagcgtgaatcttaaatg

SEQ ID NO: 73637 - DNA, 22 bp, Artificial Sequence
  chemically synthesized
atttagcgtgaatcttaaatgt

SEQ ID NO: 73638 - DNA, 22 bp, Artificial Sequence
  chemically synthesized
agcgtgaatcttaaatgtagga

SEQ ID NO: 73639 - DNA, 22 bp, Artificial Sequence
  chemically synthesized
gcgtgaatcttaaatgtaggaa

SEQ ID NO: 73640 - DNA, 22 bp, Artificial Sequence
  chemically synthesized
aaatgtaggaatgggatgtcac

SEQ ID NO: 73641 - DNA, 22 bp, Artificial Sequence
  chemically synthesized
aatgtaggaatgggatgtcaca

SEQ ID NO: 73642 - DNA, 22 bp, Artificial Sequence
  chemically synthesized
accgtagggccagcctcagaca

SEQ ID NO: 73643 - DNA, 22 bp, Artificial Sequence
  chemically synthesized
agacacaaataccagtccagca

SEQ ID NO: 73644 - DNA, 22 bp, Artificial Sequence
  chemically synthesized
ccaagaatgagtggacttctgt

SEQ ID NO: 73645 - DNA, 22 bp, Artificial Sequence
  chemically synthesized
ctgtgatggctgctcccagcct

SEQ ID NO: 73646 - DNA, 22 bp, Artificial Sequence
  chemically synthesized
tgtgatggctgctcccagcctg

SEQ ID NO: 73647 - DNA, 22 bp, Artificial Sequence
  chemically synthesized
tgatggctgctcccagcctggg

SEQ ID NO: 73648 - DNA, 22 bp, Artificial Sequence
  chemically synthesized
ctcccagcctggggcttttata

SEQ ID NO: 73649 - DNA, 22 bp, Artificial Sequence
  chemically synthesized
ccagcctggggcttttatactc

SEQ ID NO: 73650 - DNA, 22 bp, Artificial Sequence
  chemically synthesized
gggcttttatactcacttctcc

SEQ ID NO: 73651 - DNA, 22 bp, Artificial Sequence
  chemically synthesized
ttatactcacttctcctgagct

SEQ ID NO: 73652 - DNA, 22 bp, Artificial Sequence
  chemically synthesized
tatactcacttctcctgagcta

SEQ ID NO: 73653 - DNA, 22 bp, Artificial Sequence
  chemically synthesized
atactcacttctcctgagctag

SEQ ID NO: 73654 - DNA, 22 bp, Artificial Sequence
  chemically synthesized
tactcacttctcctgagctagg

SEQ ID NO: 73655 - DNA, 22 bp, Artificial Sequence
  chemically synthesized
acttctcctgagctaggctgct

SEQ ID NO: 73656 - DNA, 22 bp, Artificial Sequence
  chemically synthesized
ctcctgagctaggctgcttatc

SEQ ID NO: 73657 - DNA, 22 bp, Artificial Sequence
  chemically synthesized
tcctgagctaggctgcttatcc

SEQ ID NO: 73658 - DNA, 22 bp, Artificial Sequence
  chemically synthesized
ctgagctaggctgcttatccct

SEQ ID NO: 73659 - DNA, 22 bp, Artificial Sequence
  chemically synthesized
agctaggctgcttatccctgcc

SEQ ID NO: 73660 - DNA, 22 bp, Artificial Sequence
  chemically synthesized
ggctgcttatccctgccaatct

SEQ ID NO: 73661 - DNA, 22 bp, Artificial Sequence
  chemically synthesized
cttatccctgccaatctgactg

SEQ ID NO: 73662 - DNA, 22 bp, Artificial Sequence
  chemically synthesized
atccctgccaatctgactgcaa

SEQ ID NO: 73663 - DNA, 22 bp, Artificial Sequence
  chemically synthesized
tccctgccaatctgactgcaaa

SEQ ID NO: 73664 - DNA, 22 bp, Artificial Sequence
  chemically synthesized
ccaatctgactgcaaacctgct

SEQ ID NO: 73665 - DNA, 22 bp, Artificial Sequence
  chemically synthesized
actgcaaacctgctgattctga

SEQ ID NO: 73666 - DNA, 22 bp, Artificial Sequence
  chemically synthesized
caaacctgctgattctgattat

SEQ ID NO: 73667 - DNA, 22 bp, Artificial Sequence
  chemically synthesized
ctgattctgattattgacttag

SEQ ID NO: 73668 - DNA, 22 bp, Artificial Sequence
  chemically synthesized
attctgattattgacttagtca
